(19) United States
(12) Patent Application Publication
(10) Pub. No.: US 2003/0224461 A1
(43) Pub. Date: Dec. 4, 2003

(54) Nucleic acids, proteins, and antibodies

(75) Inventors: Craig A. Rosen, Laytonsville, MD (US); Steven M. Ruben, Olney, MD (US); Steven C. Barash, Rockville, MD (US)

Correspondence Address: HUMAN GENOME SCIENCES INC, 9410 KEY WEST AVENUE, ROCKVILLE, MD, 20850

(73) Assignee: Human Genome Sciences, Inc., Rockville, MD

(21) Appl. No.: 10/091,414

(22) Filed: Mar. 7, 2002

Related U.S. Application Data
(63) Continuation of application No. 09/764,867, filed on Jan. 17, 2001, now abandoned.
(60) Provisional application No. 60/179,065, filed on Jan. 31, 2000.
(60) Provisional application No. 60/180,628, filed on Feb. 4, 2000.
(60) Provisional application No. 60/214,886, filed on Jun. 28, 2000.
(60) Provisional application No. 60/217,487, filed on Jul. 11, 2000.
(60) Provisional application No. 60/225,758, filed on Aug. 14, 2000.
(60) Provisional application No. 60/220,963, filed on Jul. 26, 2000.
(60) Provisional application No. 60/217,496, filed on Jul. 11, 2000.
(60) Provisional application No. 60/225,447, filed on Aug. 14, 2000.
(60) Provisional application No. 60/218,290, filed on Jul. 14, 2000.
(60) Provisional application No. 60/225,757, filed on Aug. 14, 2000.
(60) Provisional application No. 60/226,868, filed on Aug. 22, 2000.
(60) Provisional application No. 60/216,647, filed on Jul. 7, 2000.
(60) Provisional application No. 60/225,267, filed on Aug. 14, 2000.
(60) Provisional application No. 60/216,880, filed on Jul. 7, 2000.
(60) Provisional application No. 60/225,270, filed on Aug. 14, 2000.
(60) Provisional application No. 60/251,869, filed on Dec. 8, 2000.
(60) Provisional application No. 60/235,834, filed on Sep. 27, 2000.
(60) Provisional application No. 60/234,274, filed on Sep. 21, 2000.
(60) Provisional application No. 60/234,223, filed on Sep. 21, 2000.
(60) Provisional application No. 60/228,924, filed on Aug. 30, 2000.
(60) Provisional application No. 60/224,518, filed on Aug. 14, 2000.
(60) Provisional application No. 60/236,369, filed on Sep. 29, 2000.
(60) Provisional application No. 60/224,519, filed on Aug. 14, 2000.
(60) Provisional application No. 60/220,964, filed on Jul. 26, 2000.
(60) Provisional application No. 60/241,809, filed on Oct. 20, 2000.
(60) Provisional application No. 60/249,299, filed on Nov. 17, 2000.
(60) Provisional application No. 60/236,327, filed on Sep. 29, 2000.
(60) Provisional application No. 60/241,785, filed on Oct. 20, 2000.
(60) Provisional application No. 60/244,617, filed on Nov. 1, 2000.
(60) Provisional application No. 60/225,268, filed on Aug. 14, 2000.
(60) Provisional application No. 60/236,368, filed on Sep. 29, 2000.
(60) Provisional application No. 60/251,856, filed on Dec. 8, 2000.
(60) Provisional application No. 60/251,868, filed on Dec. 8, 2000.
(60) Provisional application No. 60/229,344, filed on Sep. 1, 2000.
(60) Provisional application No. 60/234,997, filed on Sep. 25, 2000.
(60) Provisional application No. 60/229,343, filed on Sep. 1, 2000.
(60) Provisional application No. 60/229,345, filed on Sep. 1, 2000.
(60) Provisional application No. 60/229,287, filed on Sep. 1, 2000.
(60) Provisional application No. 60/229,513, filed on Sep. 5, 2000.
(60) Provisional application No. 60/231,413, filed on Sep. 8, 2000.
(60) Provisional application No. 60/229,509, filed on Sep. 5, 2000.
(60) Provisional application No. 60/236,367, filed on Sep. 29, 2000.
(60) Provisional application No. 60/237,039, filed on Oct. 2, 2000.
(60) Provisional application No. 60/237,038, filed on Oct. 2, 2000.
(60) Provisional application No. 60/236,370, filed on Sep. 29, 2000.
(60) Provisional application No. 60/236,802, filed on Oct. 2, 2000.
(60) Provisional application No. 60/237,037, filed on Oct. 2, 2000.
(60) Provisional application No. 60/237,040, filed on Oct. 2, 2000.
(60) Provisional application No. 60/240,960, filed on Oct. 20, 2000.
(60) Provisional application No. 60/239,935, filed on Oct. 13, 2000.
(60) Provisional application No. 60/239,937, filed on Oct. 13, 2000.
(60) Provisional application No. 60/241,787, filed on Oct. 20, 2000.
(60) Provisional application No. 60/246,474, filed on Nov. 8, 2000.
(60) Provisional application No. 60/246,532, filed on Nov. 8, 2000.
(60) Provisional application No. 60/249,216, filed on Nov. 17, 2000.
(60) Provisional application No. 60/249,210, filed on Nov. 17, 2000.
(60) Provisional application No. 60/226,681, filed on Aug. 22, 2000.
(60) Provisional application No. 60/225,759, filed on Aug. 14, 2000.
(60) Provisional application No. 60/225,213, filed on Aug. 14, 2000.
(60) Provisional application No. 60/227,182, filed on Aug. 22, 2000.
(60) Provisional application No. 60/225,214, filed on Aug. 14, 2000.
(60) Provisional application No. 60/235,836, filed on Sep. 27, 2000.
(60) Provisional application No. 60/230,438, filed on Sep. 6, 2000.
(60) Provisional application No. 60/215,135, filed on Jun. 30, 2000.
(60) Provisional application No. 60/225,266, filed on Aug. 14, 2000.
(60) Provisional application No. 60/249,218, filed on Nov. 17, 2000.
(60) Provisional application No. 60/249,208, filed on Nov. 17, 2000.
(60) Provisional application No. 60/249,213, filed on Nov. 17, 2000.
(60) Provisional application No. 60/249,212, filed on Nov. 17, 2000.
(60) Provisional application No. 60/249,207, filed on Nov. 17, 2000.
(60) Provisional application No. 60/249,245, filed on Nov. 17, 2000.
(60) Provisional application No. 60/249,244, filed on Nov. 17, 2000.
(60) Provisional application No. 60/249,217, filed on Nov. 17, 2000.
(60) Provisional application No. 60/249,211, filed on Nov. 17, 2000.
(60) Provisional application No. 60/249,215, filed on Nov. 17, 2000.
(60) Provisional application No. 60/249,264, filed on Nov. 17, 2000.
(60) Provisional application No. 60/249,214, filed on Nov. 17, 2000.
(60) Provisional application No. 60/249,297, filed on Nov. 17, 2000.
(60) Provisional application No. 60/232,400, filed on Sep. 14, 2000.
(60) Provisional application No. 60/231,242, filed on Sep. 8, 2000.
(60) Provisional application No. 60/232,081, filed on Sep. 8, 2000.
(60) Provisional application No. 60/232,080, filed on Sep. 8, 2000.
(60) Provisional application No. 60/231,414, filed on Sep. 8, 2000.
(60) Provisional application No. 60/231,244, filed on Sep. 8, 2000.
(60) Provisional application No. 60/233,064, filed on Sep. 14, 2000.
(60) Provisional application No. 60/233,063, filed on Sep. 14, 2000.
(60) Provisional application No. 60/232,397, filed on Sep. 14, 2000.
(60) Provisional application No. 60/232,399, filed on Sep. 14, 2000.
(60) Provisional application No. 60/232,401, filed on Sep. 14, 2000.
(60) Provisional application No. 60/241,808, filed on Oct. 20, 2000.
(60) Provisional application No. 60/241,826, filed on Oct. 20, 2000.
(60) Provisional application No. 60/241,786, filed on Oct. 20, 2000.
(60) Provisional application No. 60/241,221, filed on Oct. 20, 2000.
(60) Provisional application No. 60/246,475, filed on Nov. 8, 2000.
(60) Provisional application No. 60/231,243, filed on Sep. 8, 2000.
(60) Provisional application No. 60/233,065, filed on Sep. 14, 2000.
(60) Provisional application No. 60/232,398, filed on Sep. 14, 2000.
(60) Provisional application No. 60/234,998, filed on Sep. 25, 2000.
(60) Provisional application No. 60/246,477, filed on Nov. 8, 2000.
(60) Provisional application No. 60/246,528, filed on Nov. 8, 2000.
(60) Provisional application No. 60/246,525, filed on Nov. 8, 2000.
(60) Provisional application No. 60/246,476, filed on Nov. 8, 2000.
(60) Provisional application No. 60/246,526, filed on Nov. 8, 2000.
(60) Provisional application No. 60/249,209, filed on Nov. 17, 2000.
(60) Provisional application No. 60/246,527, filed on Nov. 8, 2000.
(60) Provisional application No. 60/246,523, filed on Nov. 8, 2000.
(60) Provisional application No. 60/246,524, filed on Nov. 8, 2000.
(60) Provisional application No. 60/246,478, filed on Nov. 8, 2000.
(60) Provisional application No. 60/246,609, filed on Nov. 8, 2000.
(60) Provisional application No. 60/246,613, filed on Nov. 8, 2000.
(60) Provisional application No. 60/249,300, filed on Nov. 17, 2000.
(60) Provisional application No. 60/249,265, filed on Nov. 17, 2000.
(60) Provisional application No. 60/246,610, filed on Nov. 8, 2000.
(60) Provisional application No. 60/246,611, filed on Nov. 8, 2000.
(60) Provisional application No. 60/230,437, filed on Sep. 6, 2000.
(60) Provisional application No. 60/251,990, filed on Dec. 8, 2000.
(60) Provisional application No. 60/251,988, filed on Dec. 5, 2000.
(60) Provisional application No. 60/251,030, filed on Dec. 5, 2000.
(60) Provisional application No. 60/251,479, filed on Dec. 6, 2000.
(60) Provisional application No. 60/256,719, filed on Dec. 5, 2000.
(60) Provisional application No. 60/250,160, filed on Dec. 1, 2000.
(60) Provisional application No. 60/251,989, filed on Dec. 8, 2000.
(60) Provisional application No. 60/250,391, filed on Dec. 1, 2000.
(60) Provisional application No. 60/254,097, filed on Dec. 11, 2000.
(60) Provisional application No. 60/231,968, filed on Sep. 12, 2000.
(60) Provisional application No. 60/226,279, filed on Aug. 18, 2000.
(60) Provisional application No. 60/186,350, filed on Mar. 2, 2000.
(60) Provisional application No. 60/184,664, filed on Feb. 24, 2000.
(60) Provisional application No. 60/189,874, filed on Mar. 16, 2000.
(60) Provisional application No. 60/198,123, filed on Apr. 18, 2000.
(60) Provisional application No. 60/227,009, filed on Aug. 23, 2000.
(60) Provisional application No. 60/235,484, filed on Sep. 26, 2000.
(60) Provisional application No. 60/190,076, filed on Mar. 17, 2000.
(60) Provisional application No. 60/209,467, filed on Jun. 7, 2000.
(60) Provisional application No. 60/205,515, filed on May 19, 2000.
(60) Provisional application No. 60/259,678, filed on Jan. 5, 2001.

(51) Int. Cl. G01N 33/574; C07H 21/04; C12N 9/00; C12P 21/02; C12N 5/06

(52) U.S. Cl. 435/7.23; 435/69.1; 435/320.1; 435/325; 435/183; 536/23.2

(57) ABSTRACT

The present invention relates to novel ovarian and/or breast related polynucleotides and the polypeptides encoded by these polynucleotides herein collectively known as “ovarian and/or breast antigens,” and the use of such ovarian and/or breast antigens for detecting disorders of the ovaries and/or breast, particularly the presence of ovarian and/or breast cancer and ovarian and/or breast cancer metastases. More specifically, isolated ovarian and/or breast associated nucleic acid molecules are provided encoding novel ovarian and/or breast associated polypeptides. Novel ovarian and/or breast polypeptides and antibodies that bind to these polypeptides are provided. Also provided are vectors, host cells, and recombinant and synthetic methods for producing human ovarian and/or breast associated polynucleotides and/or polypeptides. The invention further relates to diagnostic and therapeutic methods useful for diagnosing, treating, preventing and/or prognosing disorders related to the ovaries and/or breast, including ovarian and/or breast cancer, and therapeutic methods for treating such disorders. The invention further relates to screening methods for identifying agonists and antagonists of polynucleotides and polypeptides of the invention. The present invention further relates to methods and/or compositions for inhibiting the production and function of the polypeptides of the present invention.

### STATEMENT UNDER 37 C.F.R. §1.77(b)(4)

[0001] This application refers to a “Sequence Listing” listed below, which is provided as an electronic document on two identical compact discs (CD-R), labeled “Copy 1” and “Copy 2.” These compact discs each contain the file “PA116C1_seqList.txt” (1,010,901 bytes, created on Mar. 6, 2002), which is hereby incorporated in its entirety herein.

[0002] The Sequence Listing may be viewed on an IBM-PC machine running the MS-Windows operating system.

### FIELD OF THE INVENTION

[0003] The present invention relates to novel ovarian and/or breast related polynucleotides, the polypeptides encoded by these polynucleotides herein collectively referred to as “ovarian and/or breast antigens,” and antibodies that immunospecifically bind these polypeptides, and the use of such ovarian and/or breast polynucleotides, antigens, and antibodies for detecting, treating, preventing and/or prognosing disorders of the reproductive system, particularly disorders of the ovaries and/or breast, including, but not limited to, the presence of ovarian and/or breast cancer and ovarian and/or breast cancer metastases. More specifically, isolated ovarian and/or breast nucleic acid molecules are provided encoding novel ovarian and/or breast polypeptides. Novel ovarian and/or breast polypeptides and antibodies that bind to these polypeptides are provided. Also provided are vectors, host cells, and recombinant and synthetic methods for producing human ovarian and/or breast polynucleotides, polypeptides, and/or antibodies. The invention further relates to diagnostic and therapeutic methods useful for diagnosing, treating, preventing and/or prognosing disorders related to the ovaries and/or breast, including ovarian and/or breast cancer, and therapeutic methods for treating such disorders. The invention further relates to screening methods for identifying agonists and antagonists of polynucleotides and polypeptides of the invention. The invention further relates to methods and/or compositions for inhibiting or promoting the production and/or function of the polypeptides of the invention.

### BACKGROUND OF THE INVENTION

[0004] The female reproductive system is comprised of both external and internal organs. The external organs function in permitting sperm to enter the body and protecting the internal genital organs from infection and injury. The internal organs form a pathway (the genital tract) for reproduction, beginning at the ovaries, through the fallopian tubes (oviducts) and uterus, to the birth canal (vagina).

[0005] The sexual and reproductive functions in the female can be divided into two major phases: first, preparation of the body for conception, and second, the gestation and parturition. Gestation and parturition only occur if an ovum becomes fertilized. If fertilization does not occur, the reproductive system undergoes a cycle to ensure frequent readiness for conception and fertilization.

[0006] The complexity of the female reproductive system renders it susceptible to several diseases and disorders. In particular, the ovaries and breast are subject to diseases and/or disorders such as infections, hyperproliferative disorders, as well as regulatory and genetic abnormalities.

[0007] Disorders of the Ovary

[0008] A woman's ovaries are located on both sides of the uterus, below the opening of the fallopian tubes (tubes that extend from the uterus to the ovaries). In addition to producing egg cells for reproduction, the ovaries produce estrogen and progesterone, which affect many of the female characteristics and reproductive functions.

[0009] Anovulation (the absence of egg release by the ovaries) is a serious condition leading to infertility. The exact etiology of anovulation, especially in women with otherwise normal menstrual cycles, is unclear, however several potential causes are under study, including: impaired follicular development (probably due to low or absent estrogen production or binding), normal follicular development with lack of egg release (probably due to progesterone deficiency), or insufficient production of gonadotropin-releasing hormone from the hypothalamus. Current treatments include clomiphene injections or hormonal therapy, although both can lead to serious side effects such as ovarian cancer and ovarian hyperstimulation syndrome.

[0010] Anovulation is also associated with polycyctic ovary syndrome (also known as Stein-Leventhal syndrome). This syndrome is and endocrine disorder characterized by an elevated level of male hormones (androgens). Other than anovulation, symptoms include growth of male-patterned body hair (hirsutism), excessive acne, irregular or absent menses, excessive bleeding, and obesity. Usually, the ovaries appear enlarged and may contain many follicular cysts.

[0011] Ovarian cancer develops most often in women between the ages of 50 and 70. It is the third most common cancer of the female reproductive system, but more women die of ovarian cancers than of any other. Ovaries include a variety of cell types, each of which may give rise to a distinct type of cancer, including, but not limited to, ovarian epithelial cancer, ovarian germ cell tumors, ovarian papillary serous adenocarcinoma, ovarian mucinous adenocarcinoma, ovarian Krukenberg tumor, malignant mixed Mullerian tumors, and ovarian low malignant tumors.

[0012] Other disorders of the ovaries also include, but are not limited to, inflammatory disorders, such as oophoritis (e.g., caused by viral or bacterial infection), ovarian cysts, and autoimmune disorders (e.g., premature ovarian failure and autoimmune oophoritis).

[0013] Disorders of the Breast

[0014] The breast is comprised of different structures, each with its own specific function. One-third of the breast is comprised of fatty tissue. The other two-thirds is made up of structural components called ducts and lobules. Milk is produced in the lobules and funneled through the ducts to the nipple. Disorders of the breast typically involve the formation of lesions within breast tissue. While many of these lesions are benign in nature, they may lead to cancer if left untreated.

[0015] Benign breast lesions include, for example, cysts, which are non-cancerous, fluid-filled sacs that forma mass within breast tissue. The cause of breast cysts is unknown, though injury may be involved, and their main symptom is pain. While considered harmless, a professional should drain cysts and the fluid examined because cancer of the cyst wall, although quite rare, is possible.

[0016] Other benign breast lesions include fibrous breast lumps (fibroadenomas), breast infection (mastitis), intraductal papilloma, and abscesses. Fibrous breast lumps are small, solid lumps of glandular tissue. These lumps usually appear in young women, often in teenagers, and are easy to remove. Intraductal papilloma are small lumps located within a milk duct, often causing inappropriate discharge from the nipple. Breast abscesses are collections of pus in breast tissue that develop from breast infections that go untreated.

[0017] Breast cancer is the most common cancer among women, other than skin cancer and is the second leading cause of cancer death in women, after lung cancer. The American Cancer Society predicts that there will be about 182,800 new cases of invasive breast cancer in the year 2000 among women in this country and about 40,800 deaths from the disease. Breast cancer also occurs among men, although much less often. It is generally believed that this malignancy arises from a multi step process involving mutations in a relatively small number of genes, perhaps 10 or less. These mutations result in significant changes in the growth and differentiation of breast tissue that allow it to grow independent of normal cellular controls, to metastasize, and to escape immune surveillance. The genetic heterogeneity of most breast cancers suggests that they arise by a variety of initiating events and that the characteristics of individual cancers are due to the collective pattern of genetic changes that accumulate.

[0018] The discovery of new human ovarian and/or breast associated polynucleotides, the polypeptides encoded by them, and antibodies that immunospecifically bind these polypeptides, satisfies a need in the art by providing new compositions which are useful in the diagnosis, treatment, prevention and/or prognosis of disorders of the ovaries and/or breast, including, but not limited to, neoplastic disorders (e.g., ovarian Krukenberg tumor, malignant mixed Mullerian tumors, and/or as described under “Hyperproliferative Disorders” below), infectious diseases (e.g., mastitis, oophoritis, and/or as described under “Infectious Diseases” below), and inflammatory diseases (e.g., abcesses and/or as described under “Immune Disorders” below) and as described in “Reproductive System Disorders” below.

### SUMMARY OF THE INVENTION

[0019] The present invention relates to novel ovarian and/or breast related polynucleotides, the polypeptides encoded by these polynucleotides herein collectively referred to as “ovarian and/or breast antigens,” and antibodies that immunospecifically bind these polypeptides, and the use of such ovarian and/or breast polynucleotides, antigens, and antibodies for detecting, treating, preventing and/or prognosing disorders of the reproductive system, particularly disorders of the ovaries and/or breast, including, but not limited to, the presence of ovarian and/or breast cancer and ovarian and/or breast cancer metastases. More specifically, isolated ovarian and/or breast nucleic acid molecules are provided encoding novel ovarian and/or breast polypeptides. Novel ovarian and/or breast polypeptides and antibodies that bind to these polypeptides are provided. Also provided are vectors, host cells, and recombinant and synthetic methods for producing human ovarian and/or breast polynucleotides, polypeptides, and/or antibodies. The invention further relates to diagnostic and therapeutic methods useful for diagnosing, treating, preventing and/or prognosing disorders related to the ovaries and/or breast, including ovarian and/or breast cancer, and therapeutic methods for treating such disorders. The invention further relates to screening methods for identifying agonists and antagonists of polynucleotides and polypeptides of the invention. The invention further relates to methods and/or compositions for inhibiting or promoting the production and/or function of the polypeptides of the invention.

### DETAILED DESCRIPTION

[0020] Tables

[0021] Table 1A summarizes some of the polynucleotides encompassed by the invention (including cDNA clones related to the sequences (Clone ID NO:Z), contig sequences (contig identifier (Contig ID:) and contig nucleotide sequence identifier (SEQ ID NO:X)) and further summarizes certain characteristics of these polynucleotides and the polypeptides encoded thereby. The first column provides a unique clone identifier, “Clone ID NO:Z”, for a cDNA plasmid related to each ovarian and/or breast associated contig sequence disclosed in Table 1A. The second column provides a unique contig identifier, “Contig ID:” for each of the contig sequences disclosed in Table 1A. The third column provides the sequence identifier, “SEQ ID NO:X”, for each of the contig polynucleotide sequences disclosed in Table 1A. The fourth column, “ORF (From-To)”, provides the location (i.e., nucleotide position numbers) within the polynucleotide sequence of SEQ ID NO:X that delineate the preferred open reading frame (ORF) shown in the sequence listing and referenced in Table 1A as SEQ ID NO:Y (column 5). Column 6 lists residues comprising predicted epitopes contained in the polypeptides encoded by each of the preferred ORFs (SEQ ID NO:Y). Identification of potential immunogenic regions was performed according to the method of Jameson and Wolf (CABIOS, 4:181-186 (1988)); specifically, the Genetics Computer Group (GCG) implementation of this algorithm, embodied in the program PEPTIDESTRUCTURE (Wisconsin Package v10.0, Genetics Computer Group (GCG), Madison, Wisc.). This method returns a measure of the probability that a given residue is found on the surface of the protein. Regions where the antigenic index score is greater than 0.9 over at least 6 amino acids are indicated in Table 1A as “Predicted Epitopes.” In particular embodiments, ovarian and/or breast associated polypeptides of the invention comprise, or alternatively consist of, one, two, three, four, five or more of the predicted epitopes described in Table 1A. It will be appreciated that depending on the analytical criteria used to predict antigenic determinants, the exact address of the determinant may vary slightly. Column 7, “Tissue Distribution” shows the expression profile of tissue, cells, and/or cell line libraries which express the polynucleotides of the invention. The first number in column 7 (preceding the colon), represents the tissue/cell source identifier code corresponding to the code and description provided in Table 4. Expression of these polynucleotides was not observed in the other tissues and/or cell libraries tested. For those identifier codes in which the first two letters are not “AR”, the second number in column 7 (following the colon), represents the number of times a sequence corresponding to the reference polynucleotide sequence (e.g., SEQ ID NO:X) was identified in the tissue/cell source. Those tissue/cell source identifier codes in which the first two letters are “AR” designate information generated using DNA array technology. Utilizing this technology, cDNAs were amplified by PCR and then transferred, in duplicate, onto the array. Gene expression was assayed through hybridization of first strand cDNA probes to the DNA array. cDNA probes were generated from total RNA extracted from a variety of different tissues and cell lines. Probe synthesis was performed in the presence of ³³P dCTP, using oligo(dT) to prime reverse transcription. After hybridization, high stringency washing conditions were employed to remove non-specific hybrids from the array. The remaining signal, emanating from each gene target, was measured using a Phosphorimager. Gene expression was reported as Phosphor Stimulating Luminescence (PSL) which reflects the level of phosphor signal generated from the probe hybridized to each of the gene targets represented on the array. A local background signal subtraction was performed before the total signal generated from each array was used to normalize gene expression between the different hybridizations. The value presented after “[array code]:” represents the mean of the duplicate values, following background subtraction and probe normalization. One of skill in the art could routinely use this information to identify normal and/or diseased tissue(s) which show a predominant expression pattern of the corresponding polynucleotide of the invention or to identify polynucleotides which show predominant and/or specific tissue and/or cell expression. Column 8, “Cytologic Band,” provides the chromosomal location of polynucleotides corresponding to SEQ ID NO:X. Chromosomal location was determined by finding exact matches to EST and cDNA sequences contained in the NCBI (National Center for Biotechnology Information) UniGene database. Given a presumptive chromosomal location, disease locus association was determined by comparison with the Morbid Map, derived from Online Mendelian Inheritance in Man (Online Mendelian Inheritance in Man, OMIM™. McKusick-Nathans Institute for Genetic Medicine, Johns Hopkins University (Baltimore, Md.) and National Center for Biotechnology Information, National Library of Medicine (Bethesda, Md.) 2000. World Wide Web URL: http://www.ncbi.nlm.nih.gov/omim/). If the putative chromosomal location of the Query overlapped with the chromosomal location of a Morbid Map entry, an OMIM identification number is provided in column 9 labeled “OMIM Disease Reference(s)”. A key to the OMIM reference identification numbers is provided in Table 5.

[0022] Table 1B summarizes additional polynucleotides encompassed by the invention (including cDNA clones related to the sequences (Clone ID NO:Z), contig sequences (contig identifier (Contig ID:) contig nucleotide sequence identifiers (SEQ ID NO:X)), and genomic sequences (SEQ ID NO:B). The first column provides a unique clone identifier, “Clone ID NO:Z”, for a cDNA clone related to each contig sequence. The second column provides the sequence identifier, “SEQ ID NO:X”, for each contig sequence. The third column provides a unique contig identifier, “Contig ID:” for each contig sequence. The fourth column, provides a BAC identifier “BAC ID NO:A” for the BAC clone referenced in the corresponding row of the table. The fifth column provides the nucleotide sequence identifier, “SEQ ID NO:B” for a fragment of the BAC clone identified in column four of the corresponding row of the table. The sixth column, “Exon From-To”, provides the location (i.e., nucleotide position numbers) within the polynucleotide sequence of SEQ ID NO:B which delineate certain polynucleotides of the invention that are also exemplary members of polynucleotide sequences that encode polypeptides of the invention (e.g., polypeptides containing amino acid sequences encoded by the polynucleotide sequences delineated in column six, and fragments and variants thereof).

[0023] Table 2 summarizes homology and features of some of the polypeptides of the invention. The first column provides a unique clone identifier, “Clone ID NO:Z”, corresponding to a cDNA disclosed in Table 1A. The second column provides the unique contig identifier, “Contig ID:” corresponding to contigs in Table 1A and allowing for correlation with the information in Table 1A. The third column provides the sequence identifier, “SEQ ID NO:X”, for the contig polynucleotide sequences. The fourth column provides the analysis method by which the homology/identity disclosed in the row was determined. Comparisons were made between polypeptides encoded by the polynucleotides of the invention and either a non-redundant protein database (herein referred to as “NR”), or a database of protein families (herein referred to as “PFAM”) as further described below. The fifth column provides a description of PFAM/NR hits having significant matches to a polypeptide of the invention. Column six provides the accession number of the PFAM/NR hit disclosed in the fifth column. Column seven, “Score/Percent Identity”, provides a quality score or the percent identity, of the hit disclosed in column five. Columns 8 and 9, “NT From” and “NT To” respectively, delineate the polynucleotides in “SEQ ID NO:X” that encode a polypeptide having a significant match to the PFAM/NR database as disclosed in the fifth column. In specific embodiments, polypeptides of the invention comprise, or alternatively consist of, an amino acid sequence encoded by the polynucleotides in SEQ ID NO:X as delineated in columns 8 and 9, or fragments or variants thereof.

[0024] Table 3 provides polynucleotide sequences that may be disclaimed according to certain embodiments of the invention. The first column provides a unique clone identifier, “Clone ID NO:Z”, for a cDNA clone related to ovarian and/or breast associated contig sequences disclosed in Table 1A. The second column provides the sequence identifier, “SEQ ID NO:X”, for contig polynucleotide sequences disclosed in Table 1A. The third column provides the unique contig identifier, “Contig ID”, for contigs disclosed in Table IA. The fourth column provides a unique integer ‘a’ where ‘a’ is any integer between 1 and the final nucleotide minus 15 of SEQ ID NO:X, represented as “Range of a”, and the fifth column provides a unique integer ‘b’ where ‘b’ is any integer between 15 and the final nucleotide of SEQ ID NO:X, represented as “Range of b”, where both a and b correspond to the positions of nucleotide residues shown in SEQ ID NO:X, and where b is greater than or equal to a +14. For each of the polynucleotides shown as SEQ ID NO:X, the uniquely defined integers can be substituted into the general formula of a-b, and used to describe polynucleotides which may be preferably excluded from the invention. In certain embodiments, preferably excluded from the polynucleotides of the invention (including polynucleotide fragments and variants as described herein and diagnostic and/or therapeutic uses based on these polynucleotides) are at least one, two, three, four, five, ten, or more of the polynucleotide sequence(s) having the accession number(s) disclosed in the sixth column of this Table (including for example, published sequence in connection with a particular BAC clone). In further embodiments, preferably excluded from the invention are the specific polynucleotide sequence(s) contained in the clones corresponding to at least one, two, three, four, five, ten, or more of the available material having the accession numbers identified in the sixth column of this Table (including for example, the actual sequence contained in an identified BAC clone).

[0025] Table 4 provides a key to the tissue/cell source identifier code disclosed in Table 1A, column 7. Column 1 provides the key to the tissue/cell source identifier code disclosed in Table 1A, Column 7. Columns 2-5 provide a description of the tissue or cell source. Codes corresponding to diseased tissues are indicated in column 6 with the word “disease”. The use of the word “disease” in column 6 is non-limiting. The tissue or cell source may be specific (e.g. a neoplasm), or may be disease-associated (e.g., a tissue sample from a normal portion of a diseased organ). Furthermore, tissues and/or cells lacking the “disease” designation may still be derived from sources directly or indirectly involved in a disease state or disorder, and therefore may have a further utility in that disease state or disorder. In numerous cases where the tissue/cell source is a library, column 7 identifies the vector used to generate the library.

[0026] Table 5 provides a key to the OMIM™ reference identification numbers disclosed in Table 1A, column 9. OMIM reference identification numbers (Column 1) were derived from Online Mendelian Inheritance in Man (Online Mendelian Inheritance in Man, OMIM™. McKusick-Nathans Institute for Genetic Medicine, Johns Hopkins University (Baltimore, Md.) and National Center for Biotechnology Information, National Library of Medicine, (Bethesda, Md.) 2000. World Wide Web URL: http://www.ncbi.nlm.nih.gov/omirn/). Column 2 provides diseases associated with the cytologic band disclosed in Table 1A, column 8, as determined from the Morbid Map database.

[0027] Table 6 summarizes ATCC Deposits, Deposit dates, and ATCC designation numbers of deposits made with the ATCC in connection with the present application.

[0028] Table 7 shows the cDNA libraries sequenced, tissue source description, vector information and ATCC designation numbers relating to these cDNA libraries.

[0029] Table 8 provides a physical characterization of clones encompassed by the invention. The first column provides the unique clone identifier, “Clone ID NO:Z”, for certain cDNA clones of the invention, as described in Table 1A. The second column provides the size of the cDNA insert contained in the corresponding cDNA clone.

[0030] Definitions

[0031] The following definitions are provided to facilitate understanding of certain terms used throughout this specification.

[0032] In the present invention, “isolated” refers to material removed from its original environment (e.g., the natural environment if it is naturally occurring), and thus is altered “by the hand of man” from its natural state. For example, an isolated polynucleotide could be part of a vector or a composition of matter, or could be contained within a cell, and still be “isolated” because that vector, composition of matter, or particular cell is not the original environment of the polynucleotide. The term “isolated” does not refer to genomic or cDNA libraries, whole cell total or mRNA preparations, genomic DNA preparations (including those separated by electrophoresis and transferred onto blots), sheared whole cell genomic DNA preparations or other compositions where the art demonstrates no distinguishing features of the polynucleotide sequences of the present invention.

[0033] As used herein, a “polynucleotide” refers to a molecule having a nucleic acid sequence encoding SEQ ID NO:Y or a fragment or variant thereof; a nucleic acid sequence contained in SEQ ID NO:X (as described in column 3 of Table 1A) or the complement thereof; a cDNA sequence contained in Clone ID NO:Z (as described in column 1 of Table 1A and contained within a library deposited with the ATCC); a nucleotide sequence encoding the polypeptide encoded by a nucleotide sequence in SEQ ID NO:B as defined in column 6 of Table 1B or a fragment or variant thereof; or a nucleotide coding sequence in SEQ ID NO:B as defined in column 6 of Table 1B or the complement thereof. For example, the polynucleotide can contain the nucleotide sequence of the full length cDNA sequence, including the 5′ and 3′ untranslated sequences, the coding region, as well as fragments, epitopes, domains, and variants of the nucleic acid sequence. Moreover, as used herein, a “polypeptide” refers to a molecule having an amino acid sequence encoded by a polynucleotide of the invention as broadly defined (obviously excluding poly-Phenylalanine or poly-Lysine peptide sequences which result from translation of a polyA tail of a sequence corresponding to a cDNA).

[0034] As used herein, an “ovarian and/or breast antigen” refers collectively to any polynucleotide disclosed herein (e.g., a nucleic acid sequence contained in SEQ ID NO:X or the complement therof, or cDNA sequence contained in Clone ID NO:Z, (e.g., a nucleic acid sequence contained in SEQ ID NO:X or the complement thereof, or cDNA sequence contained in Clone ID NO:Z, or a nucleotide sequence encoding the polypeptide encoded by a nucleotide sequence in SEQ ID NO:B as defined in column 6 of Table 1B, or a nucleotide coding sequence in SEQ ID NO:B as defined in column 6 of Table 1B or the complement thereof and fragments or variants thereof as described herein) or any polypeptide disclosed herein (e.g., an amino acid sequence contained in SEQ ID NO:Y, an amino acid sequence encoded by SEQ ID NO:X, or the complement thereof, an amino acid sequence encoded by the cDNA sequence contained in Clone ID NO:Z, an amino acid sequence encoded by SEQ ID NO:B, or the complement thereof, and fragments or variants thereof as described herein). These ovarian and/or breast antigens have been determined to be predominantly expressed in ovarian and/or breast tissues, including normal or diseased tissues (as shown in Table 1A column 7 and Table 4).

[0035] In the present invention, “SEQ ID NO:X” was often generated by overlapping sequences contained in multiple clones (contig analysis). A representative clone containing all or most of the sequence for SEQ ID NO:X is deposited at Human Genome Sciences, Inc. (HGS) in a catalogued and archived library. As shown, for example, in column 1 of Table 1A, each clone is identified by a cDNA Clone ID (identifier generally referred to herein as Clone ID NO:Z). Each Clone ID is unique to an individual clone and the Clone ID is all the information needed to retrieve a given clone from the HGS library. Furthermore, certain clones disclosed in this application have been deposited with the ATCC on Oct. 5, 2000, having the ATCC designation numbers PTA 2574 and PTA 2575; and on Jan. 5, 2001, having the depositor reference numbers TS-1, TS-2, AC-1, and AC-2. In addition to the individual cDNA clone deposits, most of the cDNA libraries from which the clones were derived were deposited at the American Type Culture Collection (hereinafter “ATCC”). Table 7 provides a list of the deposited cDNA libraries. One can use the Clone ID NO:Z to determine the library source by reference to Tables 6 and 7. Table 7 lists the deposited cDNA libraries by name and links each library to an ATCC Deposit. Library names contain four characters, for example, “HTWE.” The name of a cDNA clone (Clone ID NO:Z) isolated from that library begins with the same four characters, for example “HTWEP07”. As mentioned below, Table 1A correlates the Clone ID NO:Z names with SEQ ID NO:X. Thus, starting with an SEQ ID NO:X, one can use Tables 1A, 6 and 7 to determine the corresponding Clone ID NO:Z, which library it came from and which ATCC deposit the library is contained in. Furthermore, it is possible to retrieve a given cDNA clone from the source library by techniques known in the art and described elsewhere herein. The ATCC is located at 10801 University Boulevard, Manassas, Va. 20110-2209, USA. The ATCC deposits were made pursuant to the terms of the Budapest Treaty on the international recognition of the deposit of microorganisms for the purposes of patent procedure.

[0036] In specific embodiments, the polynucleotides of the invention are at least 15, at least 30, at least 50, at least 100, at least 125, at least 500, or at least 1000 continuous nucleotides but are less than or equal to 300 kb, 200 kb, 100 kb, 50 kb, 15 kb, 10 kb, 7.5 kb, 5 kb, 2.5 kb, 2.0 kb, or 1 kb, in length. In a further embodiment, polynucleotides of the invention comprise a portion of the coding sequences, as disclosed herein, but do not comprise all or a portion of any intron. In another embodiment, the polynucleotides comprising coding sequences do not contain coding sequences of a genomic flanking gene (i.e., 5′ or 3′ to the gene of interest in the genome). In other embodiments, the polynucleotides of the invention do not contain the coding sequence of more than 1000, 500, 250, 100, 50, 25, 20, 15, 10, 5, 4, 3, 2, or 1 genomic flanking gene(s).

[0037] A “polynucleotide” of the present invention also includes those polynucleotides capable of hybridizing, under stringent hybridization conditions, to sequences contained in SEQ ID NO:X, or the complement thereof (e.g., the complement of any one, two, three, four, or more of the polynucleotide fragments described herein), the polynucleotide sequence delineated in columns 8 and 9 of Table 2 or the complement thereof, and/or cDNA sequences contained in Clone ID NO:Z (e.g., the complement of any one, two, three, four, or more of the polynucleotide fragments, or the cDNA clone within the pool of cDNA clones deposited with the ATCC, described herein) and/or the polynucleotide sequence delineated in column 6 of Table 1B or the complement thereof. “Stringent hybridization conditions” refers to an overnight incubation at 42 degree C. in a solution comprising 50% formamide, 5×SSC (750 mM NaCl, 75 mM trisodium citrate), 50 mM sodium phosphate (pH 7.6), 5× Denhardt's solution, 10% dextran sulfate, and 20 μg/ml denatured, sheared salmon sperm DNA, followed by washing the filters in 0.1×SSC at about 65 degree C.

[0038] Also contemplated are nucleic acid molecules that hybridize to the polynucleotides of the present invention at lower stringency hybridization conditions. Changes in the stringency of hybridization and signal detection are primarily accomplished through the manipulation of formamide concentration (lower percentages of formamide result in lowered stringency), salt conditions, or temperature. For example, lower stringency conditions include an overnight incubation at 37 degree C. in a solution comprising 6×SSPE (20×SSPE=3M NaCl; 0.2M NaH₂PO₄; 0.02M EDTA, pH 7.4), 0.5% SDS, 30% formamide, 100 ug/ml salmon sperm blocking DNA; followed by washes at 50 degree C. with 1×SSPE, 0.1% SDS. In addition, to achieve even lower stringency, washes performed following stringent hybridization can be done at higher salt concentrations (e.g. 5×SSC).

[0039] Note that variations in the above conditions may be accomplished through the inclusion and/or substitution of alternate blocking reagents used to suppress background in hybridization experiments. Typical blocking reagents include Denhardt's reagent, BLOTTO, heparin, denatured salmon sperm DNA, and commercially available proprietary formulations. The inclusion of specific blocking reagents may require modification of the hybridization conditions described above, due to problems with compatibility.

[0040] Of course, a polynucleotide which hybridizes only to polyA+ sequences (such as any 3′ terminal polyA+ tract of a cDNA shown in the sequence listing), or to a complementary stretch of T (or U) residues, would not be included in the definition of “polynucleotide,” since such a polynucleotide would hybridize to any nucleic acid molecule containing a poly (A) stretch or the complement thereof (e.g., practically any double-stranded cDNA clone generated using oligo dT as a primer).

[0041] The polynucleotide of the present invention can be composed of any polyribonucleotide or polydeoxribonucleotide, which may be unmodified RNA or DNA or modified RNA or DNA. For example, polynucleotides can be composed of single- and double-stranded DNA, DNA that is a mixture of single- and double-stranded regions, single- and double-stranded RNA, and RNA that is mixture of single- and double-stranded regions, hybrid molecules comprising DNA and RNA that may be single-stranded or, more typically, double-stranded or a mixture of single- and double-stranded regions. In addition, the polynucleotide can be composed of triple-stranded regions comprising RNA or DNA or both RNA and DNA. A polynucleotide may also contain one or more modified bases or DNA or RNA backbones modified for stability or for other reasons. “Modified” bases include, for example, tritylated bases and unusual bases such as inosine. A variety of modifications can be made to DNA and RNA; thus, “polynucleotide” embraces chemically, enzymatically, or metabolically modified forms.

[0042] The polypeptide of the present invention can be composed of amino acids joined to each other by peptide bonds or modified peptide bonds, i.e., peptide isosteres, and may contain amino acids other than the 20 gene-encoded amino acids. The polypeptides may be modified by either natural processes, such as posttranslational processing, or by chemical modification techniques which are well known in the art. Such modifications are well described in basic texts and in more detailed monographs, as well as in a voluminous research literature. Modifications can occur anywhere in a polypeptide, including the peptide backbone, the amino acid side-chains and the amino or carboxyl termini. It will be appreciated that the same type of modification may be present in the same or varying degrees at several sites in a given polypeptide. Also, a given polypeptide may contain many types of modifications. Polypeptides may be branched, for example, as a result of ubiquitination, and they may be cyclic, with or without branching. Cyclic, branched, and branched cyclic polypeptides may result from posttranslation natural processes or may be made by synthetic methods. Modifications include acetylation, acylation, ADP-ribosylation, amidation, covalent attachment of flavin, covalent attachment of a heme moiety, covalent attachment of a nucleotide or nucleotide derivative, covalent attachment of a lipid or lipid derivative, covalent attachment of phosphotidylinositol, cross-linking, cyclization, disulfide bond formation, demethylation, formation of covalent cross-links, formation of cysteine, formation of pyroglutamate, formylation, gamma-carboxylation, glycosylation, GPI anchor formation, hydroxylation, iodination, methylation, myristoylation, oxidation, pegylation, proteolytic processing, phosphorylation, prenylation, racemization, selenoylation, sulfation, transfer-RNA mediated addition of amino acids to proteins such as arginylation, and ubiquitination. (See, for instance, PROTEINS—STRUCTURE AND MOLECULAR PROPERTIES, 2nd Ed., T. E. Creighton, W. H. Freeman and Company, New York (1993); POSTTRANSLATIONAL COVALENT MODIFICATION OF PROTEINS, B. C. Johnson, Ed., Academic Press, New York, pgs. 1-12 (1983); Seifter et al., Meth. Enzymol. 182:626-646 (1990); Rattan et al., Ann. N.Y. Acad. Sci. 663:48-62 (1992).)

[0043] “SEQ ID NO:X” refers to a polynucleotide sequence described, for example, in Tables 1A or 2, while “SEQ ID NO:Y” refers to a polypeptide sequence described in column 5 of Table 1A. SEQ ID NO:X is identified by an integer specified in column 3 of Table 1A. The polypeptide sequence SEQ ID NO:Y is a translated open reading frame (ORF) encoded by polynucleotide SEQ ID NO:X. “Clone ID NO:Z” refers to a cDNA clone described in column 1 of Table 1A.

[0044] “A polypeptide having biological activity” refers to a polypeptide exhibiting activity similar to, but not necessarily identical to, an activity of a polypeptide of the present invention, including mature forms, as measured in a particular biological assay, with or without dose dependency. In the case where dose dependency does exist, it need not be identical to that of the polypeptide, but rather substantially similar to the dose-dependence in a given activity as compared to the polypeptide of the present invention (i.e., the candidate polypeptide will exhibit greater activity or not more than about 25-fold less and, preferably, not more than about tenfold less activity, and most preferably, not more than about three-fold less activity relative to the polypeptide of the present invention).

[0045] Table 1A summarizes some of the polynucleotides encompassed by the invention (including contig sequences (SEQ ID NO:X) and clones (Clone ID NO:Z) and further summarizes certain characteristics of these polynucleotides and the polypeptides encoded thereby.

[0046] Polynucleotides and Polypeptides

TABLE 1A

| | | | | AA | | Tissue Distribution | | |
|---|---|---|---|---|---|---|---|---|
| | | SEQ | | SEQ | | Library code: count | | OMIM |
| Clone ID | Contig | ID | ORF | ID | | (see Table IV for | Cytologic | Disease |
| NO: Z | ID: | NO: X | (From-To) | NO: Y | Predicted Epitopes | Library Codes) | Band | Reference(s): |
| HBNAI71 | 655514 | 11 | 1-231 | 117 | | H0188: 2 | | |
| HBNAN41 | 655842 | 12 | 123-302 | 118 | Asn-3 to Ser-15, | H0188: 2 | | |
| | | | | | Lys-21 to Asn-30. | | | |
| HBNAW92 | 524954 | 13 | 2-226 | 119 | Gly-21 to Pro-27. | H0188: 2 | | |
| HBNAX71 | 530843 | 14 | 1-87 | 120 | | H0188: 2 | | |
| HBNAY58 | 558193 | 15 | 245-400 | 121 | Leu-14 to Thr-20. | H0188: 2 and L0603: 1. | | |
| HBNBT52 | 524869 | 16 | 201-380 | 122 | Gln-48 to Pro-56. | H0188: 2 | | |
| HMVDU41 | 957804 | 17 | 2-289 | 123 | Ser-37 to Ala-46, | H0651: 29 and S0212: 1. | | |
| | | | | | Cys-77 to Ser-85. | | | |
| HNBTT79 | 965424 | 18 | 3-194 | 124 | Pro-12 to Ser-24, | H0662: 2 | | |
| | | | | | Thr-42 to Ser-47, | | | |
| | | | | | Pro-52 to Trp-59. | | | |
| HNBTX52 | 965428 | 19 | 52-339 | 125 | | H0662: 2 | | |
| HNBUM19 | 933672 | 20 | 209-472 | 126 | | H0662: 2 | | |
| HNBUR07 | 951814 | 21 | 203-412 | 127 | Lys-8 to Asn-14, | H0662: 2 | | |
| | | | | | Lys-48 to Asp-53. | | | |
| HNOAX12 | 969363 | 22 | 231-524 | 128 | Pro-76 to Cys-88. | H0651: 8, L0744: 2, | | |
| | | | | | | L0598: 1 and L0756: 1. | | |
| HNOCQ04 | 964933 | 23 | 3-374 | 129 | | H0651: 6 | | |
| HNOCT39 | 952611 | 24 | 46-114 | 130 | Asn-18 to Lys-23. | H0651: 3 | | |
| HNOCU05 | 957833 | 25 | 536-745 | 131 | | H0651: 2 | | |
| HODER91 | 789661 | 26 | 1-351 | 132 | Phe-28 to Thr-33, | AR061: 4, AR089: 2 | | |
| | | | | | Ile-44 to Thr-54, | H0651: 709, L0766: 5, | | |
| | | | | | Arg-78 to Lys-88, | L0754: 5, L0756: 3, | | |
| | | | | | Gln-99 to Lys-106. | L0803: 2, L0779: 2, | | |
| | | | | | | L0777: 2, L0759: 2, | | |
| | | | | | | S0354: 1, H0643: 1, | | |
| | | | | | | H0013: 1, H0194: 1, | | |
| | | | | | | H0545: 1, H0373: 1, | | |
| | | | | | | H0252: 1, H0615: 1, | | |
| | | | | | | H0316: 1, H0040: 1, | | |
| | | | | | | H0641: 1, H0647: 1, | | |
| | | | | | | S0422: 1, L0598: 1, | | |
| | | | | | | L0369: 1, L0520: 1, | | |
| | | | | | | L0762: 1, L0649: 1, | | |
| | | | | | | L0804: 1, L0527: 1, | | |
| | | | | | | L0656: 1, H0144: 1, | | |
| | | | | | | H0702: 1, H0547: 1, | | |
| | | | | | | H0555: 1, H0436: 1, | | |
| | | | | | | S0028: 1, L0746: 1, | | |
| | | | | | | L0750: 1, L0780: 1, | | |
| | | | | | | L0752: 1 and L0686: 1. | | |
| HOVAF17 | 576627 | 27 | 215-358 | 133 | | H0428: 2 | | |
| HOVAF71 | 757294 | 28 | 55-183 | 134 | | H0428: 2 | | |
| HOVAG49 | 927320 | 29 | 2-298 | 135 | | H0428: 2 and L0588: 1. | | |
| HOVAI41 | 670963 | 30 | 3-107 | 136 | | H0428: 2 | | |
| HOVAM50 | 723671 | 31 | 64-243 | 137 | Ser-22 to Arg-35, | H0428: 2 | | |
| | | | | | Lys-39 to Gly-44. | | | |
| HOVBY34 | 706816 | 32 | 2-295 | 138 | Gly-1 to Ala-8, | H0428: 2 | | |
| | | | | | Glu-67 to His-74. | | | |
| HOVBZ26 | 888442 | 33 | 3-215 | 139 | Gly-37 to Arg-46, | AR051: 44, AR050: | | |
| | | | | | Ser-57 to Trp-70. | 43, AR054: 30 | | |
| | | | | | | H0428: 2 | | |
| HOVCA52 | 727170 | 34 | 232-354 | 140 | | H0428: 2 | | |
| HOVCD39 | 705406 | 35 | 25-192 | 141 | Ser-8 to Leu-16. | H0428: 2 | | |
| HOVCI76 | 858845 | 36 | 60-284 | 142 | Arg-13 to Gly-18, | H0428: 3 | | |
| | | | | | Gln-44 to Ser-50. | | | |
| HOVCI77 | 713792 | 37 | 119-241 | 143 | Lys-7 to Ser-16. | H0428: 2 | | |
| HOVCJ24 | 858844 | 38 | 68-319 | 144 | Leu-16 to His-22, | H0428: 2 | | |
| | | | | | Cys-50 to Pro-55. | | | |
| HOVCO11 | 970814 | 39 | 157-423 | 145 | Val-11 to Leu-18. | H0428: 2 and L0770: 1. | 7p15 | 138079, |
| | | | | | | | | 138079, |
| | | | | | | | | 139191, |
| | | | | | | | | 142959, |
| | | | | | | | | 153880, |
| | | | | | | | | 180104, |
| | | | | | | | | 600994, |
| | | | | | | | | 601649 |
| HOVCO58 | 736065 | 40 | 283-420 | 146 | | H0428: 2 | | |
| HOVCQ47 | 496190 | 41 | 1-213 | 147 | | L0758: 3, H0428: 2, | | |
| | | | | | | L0794: 2, L0764: 1, | | |
| | | | | | | L0803: 1 and L0593: 1. | | |
| HOVDY04 | 926219 | 42 | 81-320 | 148 | Ser-25 to Gly-45. | L0769: 4, L0758: 3, | | |
| | | | | | | L0717: 2, H0428: 2, | | |
| | | | | | | L0794: 2, L0731: 2, | | |
| | | | | | | L0591: 2, L0776: 1, | | |
| | | | | | | L0786: 1 and L0779: 1. | | |
| HWLHJ68 | 957834 | 43 | 78-410 | 149 | Cys-17 to Lys-31. | AR089: 3, AR061: 2 | | |
| | | | | | | H0651: 709, L0766: 5, | | |
| | | | | | | L0754: 5, L0756: 3, | | |
| | | | | | | L0803: 2, L0779: 2, | | |
| | | | | | | L0759: 2, S0354: 1, | | |
| | | | | | | H0643: 1, H0013: 1, | | |
| | | | | | | H0194: 1, H0545: 1, | | |
| | | | | | | H0373: 1, H0252: 1, | | |
| | | | | | | H0615: 1, H0316: 1, | | |
| | | | | | | H0040: 1, H0641: 1, | | |
| | | | | | | H0647: 1, S0422: 1, | | |
| | | | | | | L0598: 1, L0369: 1, | | |
| | | | | | | L0520: 1, L0762: 1, | | |
| | | | | | | L0649: 1, L0804: 1, | | |
| | | | | | | L0527: 1, L0656: 1, | | |
| | | | | | | H0144: 1, H0702: 1, | | |
| | | | | | | H0547: 1, H0555: 1, | | |
| | | | | | | H0436: 1, S0028: 1, | | |
| | | | | | | L0746: 1, L0750: 1, | | |
| | | | | | | L0777: 1, L0780: 1, | | |
| | | | | | | L0752: 1 and L0686: 1. | | |
| HOVEV01 | 914553 | 44 | 49-540 | 150 | Gly-50 to Thr-57, | L0748:3, L0603:2, | | |
| | | | | | Gln-60 to Trp-74, | H0428: 1, L0771: 1, | | |
| | | | | | Glu-86 to Cys-96, | L0749: 1 and L0757: 1. | | |
| | | | | | Met-106 to Gly-124. | | | |
| HOVEU10 | 961865 | 45 | 170-328 | 151 | | H0428: 1 | | |
| HOVEU06 | 933737 | 46 | 106-201 | 152 | | H0428: 1 | | |
| HOVEO04 | 926209 | 47 | 18-179 | 153 | Ser-27 to Gly-32. | H0428: 1 and L0750: 1. | | |
| HOVEE20 | 909030 | 48 | 88-444 | 154 | Asn-7 to Met-12, | AR089: 7, AR061: 2 | | |
| | | | | | Cys-38 to Thr-44. | H0428: 1 | | |
| HOVDD82 | 948619 | 49 | 2-172 | 155 | Arg-2 to Cys-11, | H0428: 1 and L0766: 1. | | |
| | | | | | Cys-15 to Gly-20. | | | |
| HOVDD10 | 961887 | 50 | 3-323 | 156 | Glu-25 to Pro-39, | H0428: 1 and L0462: 1 | | |
| | | | | | Thr-44 to Tyr-50, | | | |
| | | | | | Pro-53 to Gln-60, | | | |
| | | | | | Ser-67 to Val-82. | | | |
| HOVCP77 | 772210 | 51 | 120-299 | 157 | Tyr-17 to Gln-23, | L0439: 12 and H0428: 1. | | |
| | | | | | Lys-32 to Ser-38. | | | |
| HOVCO50 | 932544 | 52 | 425-586 | 158 | | H0428: 1, L0752: 1 | | |
| | | | | | | and L0759: 1. | | |
| HOVCN57 | 734779 | 53 | 143-301 | 159 | Lys-1 to Gln-12, | H0428: 1 and L0744: 1. | | |
| | | | | | Cys-44 to Lys-49. | | | |
| HOVCM77 | 772208 | 54 | 107-265 | 160 | Arg-30 to Lys-39. | H0428: 1 and L0439: 1. | | |
| HOVCM03 | 924196 | 55 | 159-257 | 161 | Glu-10 to Thr-18. | H0428: 1 and L0750: 1. | | |
| HOVCI89 | 786917 | 56 | 194-322 | 162 | | H0428: 1 | | |
| HOVCI08 | 959470 | 57 | 938-75 | 163 | Pro-43 to Ser-49. | H0428: 1, L0743: 1, | | |
| | | | | | | L0744: 1, L0747: 1, | | |
| | | | | | | L0752: 1 and L0592: 1. | | |
| HOVCD33 | 702445 | 58 | 124-252 | 164 | Asp-33 to Val-38. | L0439: 2 and H0428: 1. | | |
| HOVCC57 | 465313 | 59 | 210-380 | 165 | | H0428: 1 and L0581: 1. | | |
| HOVBQ07 | 858863 | 60 | 200-604 | 166 | Asp-1 to Val-13, | H0428: 1, L0764: 1 | | |
| | | | | | Ser-17 to Ser-26. | and L0758: 1. | | |
| HOVBK69 | 757594 | 61 | 116-424 | 167 | | H0428: 1 and L0740: 1. | | |
| HOVBK38 | 956238 | 62 | 33-263 | 168 | | L0766: 2, H0428: 1, | | |
| | | | | | | L0775: 1, L0782: 1, | | |
| | | | | | | L0783: 1, L0748: 1 and | | |
| | | | | | | L0758: 1. | | |
| HOVBK24 | 858857 | 63 | 75-353 | 169 | Gln-1 to Leu-7, | H0428: 1, L0748: 1 | | |
| | | | | | Ser-32 to His-42. | and L0581: 1. | | |
| HOVBI67 | 751665 | 64 | 155-355 | 170 | | L0749: 2 and H0428: 1. | | |
| HOVBI20 | 669730 | 65 | 1-183 | 171 | | H0428: 1 and L0748: 1. | | |
| HOVAZ89 | 904818 | 66 | 2-298 | 172 | Glu-14 to Pro-19, | H0428: 1 | | |
| | | | | | Arg-24 to Arg-36, | | | |
| | | | | | Arg-85 to His-90. | | | |
| HOVAZ65 | 750273 | 67 | 275-457 | 173 | | L0740: 2 and H0428: 1. | | |
| HOVAY88 | 827077 | 68 | 203-409 | 174 | Asn-20 to Lys-25. | H0428: 1 | | |
| HOVAY58 | 736077 | 69 | 179-388 | 175 | Val-1 to Thr-11, | H0428: 1 and L0754: 1. | | |
| | | | | | Tyr-23 to Leu-31, | | | |
| | | | | | Arg-47 to Thr-52. | | | |
| HOVAY42 | 713812 | 70 | 168-320 | 176 | Asn-20 to Glu-26. | H0428: 1 | | |
| HOVAY03 | 921959 | 71 | 147-1 | 177 | | H0428: 1 | | |
| HOVAW62 | 745704 | 72 | 2-247 | 178 | | L0516: 2, H0428: 1 | | |
| | | | | | | and L0753: 1. | | |
| HOVAO25 | 678163 | 73 | 112-270 | 179 | | H0428: 1 and L0748: 1. | | |
| HOVAN51 | 725005 | 74 | 3-122 | 180 | | L0748: 5, H0428: 1 | | |
| | | | | | | and L0749: 1. | | |
| HOVAJ07 | 953422 | 75 | 279-452 | 181 | Lys-40 to Phe-47. | H0428: 1 and L0743: 1. | | |
| HOVAI05 | 932093 | 76 | 2-199 | 182 | Val-41 to Lys-46. | H0428: 1 and L0752: 1. | | |
| HOVAF07 | 953553 | 77 | 22-102 | 183 | | H0428: 1 | | |
| HOVAF01 | 916770 | 78 | 245-3 | 184 | Phe-58 to Arg-67, | H0428: 1 | | |
| | | | | | Leu-71 to Thr-77. | | | |
| HOVAC77 | 578783 | 79 | 181-366 | 185 | | H0428: 1 | | |
| HOVAC54 | 578809 | 80 | 36-197 | 186 | Ile-23 to Cys-35. | H0428: 1 and L0748: 1. | | |
| HOVAC26 | 578810 | 81 | 45-278 | 187 | Gln-12 to Gly-17, | H0428: 1 | | |
| | | | | | Ser-28 to Pro-39. | | | |
| HOVAB85 | 578788 | 82 | 3-407 | 188 | Asp-1 to Arg-6, | H0428: 1 | | |
| | | | | | Thr-31 to Leu-43, | | | |
| | | | | | Val-53 to His-59, | | | |
| | | | | | Pro-61 to Val-73, | | | |
| | | | | | Ser-81 to Ser-96. | | | |
| HOVAB61 | 578791 | 83 | 256-477 | 189 | | L0756: 2, L0361: 2, | | |
| | | | | | | H0428: 1, L0598: 1 and | | |
| | | | | | | L0592: 1. | | |
| HOOAB23 | 522227 | 84 | 249-49 | 190 | His-1 to Gln-7, | H0028: 1 and L0792: 1. | | |
| | | | | | Gly-14 to Gly-23, | | | |
| | | | | | Leu-50 to Arg-67. | | | |
| HOOAB05 | 932925 | 85 | 196-579 | 191 | Ser-66 to Pro-76. | H0028: 1 and L0777: 1. | | |
| HONAK10 | 968610 | 86 | 3-116 | 192 | Glu-1 to Lys-6. | L0766: 1 and T0068: 1. | | |
| HONAH06 | 936029 | 87 | 677-333 | 193 | | AR051: 655, AR050: | | |
| | | | | | | 494, AR054: 346 | | |
| | | | | | | T0068: 1 | | |
| HONAE50 | 723571 | 88 | 344-559 | 194 | Gly-18 to Thr-32. | T0068: 1 and L0749: 1. | | |
| HONAD65 | 747152 | 89 | 174-290 | 195 | Ser-6 to Lys-14. | T0068: 1 and L0592: 1. | | |
| HONAD02 | 859016 | 90 | 732-1040 | 196 | | AR061: 1, AR089: 1 | | |
| | | | | | | T0068: 1 and L0779: 1. | | |
| HNOJJ12 | 969077 | 91 | 1517-1771 | 197 | | H0687: 1, L0803: 1 | | |
| | | | | | | and L0666: 1. | | |
| HNOAD04 | 926258 | 92 | 464-625 | 198 | Thr-12 to Ser-19, | L0766: 4, L0439: 4, | | |
| | | | | | Lys-28 to Ala-39. | L0646: 1, H0651: 1, | | |
| | | | | | | L0756: 1 and L0759: 1. | | |
| HNBVH02 | 917719 | 93 | 91-192 | 199 | | H0662: 1 and L0748: 1. | | |
| HNBVC03 | 922402 | 94 | 3-104 | 200 | Tyr-6 to Thr-15. | H0662: 1 and L0766: 1. | | |
| HNBUQ06 | 933673 | 95 | 321-521 | 201 | Glu-1 to Tyr-7, | H0662: 1, L0794: 1 | | |
| | | | | | Pro-42 to Leu-47, | and L0758: 1. | | |
| | | | | | Pro-50 to Ala-57. | | | |
| HNBUO01 | 914361 | 96 | 109-336 | 202 | His-1 to Phe-6, | H0662: 1 and L0524: 1. | | |
| | | | | | Asn-58 to Met-65. | | | |
| HNBUI10 | 961734 | 97 | 3-437 | 203 | Pro-6 to Cys-24, | H0662: 1, L0764: 1, | | |
| | | | | | Glu-26 to Trp-37, | L0803: 1, L0774: 1, | | |
| | | | | | Asn-65 to Leu-73, | L0758: 1 and L0599: 1. | | |
| | | | | | Gln-81 to Gly-90, | | | |
| | | | | | Gly-100 to Gly-115, | | | |
| | | | | | Asn-118 to Ser-126. | | | |
| HBNBQ50 | 887096 | 98 | 222-473 | 204 | Arg-54 to Arg-60. | H0188: 1 and L0751: 1. | | |
| HBNBO30 | 430360 | 99 | 3-155 | 205 | Glu-17 to Tyr-22. | L0774: 2, L0741: 2, | | |
| | | | | | | L0439: 2, L0411: 1 and | | |
| | | | | | | H0188: 1. | | |
| HBNBL29 | 703113 | 100 | 245-409 | 206 | | H0188: 1, L0663: 1 | | |
| | | | | | | and L0748: 1. | | |
| HBNBJ29 | 907015 | 101 | 63-215 | 207 | Trp-18 to Gly-23, | H0188: 1 and L0526: 1. | | |
| | | | | | Ser-25 to Met-31. | | | |
| HBNBJ06 | 960664 | 102 | 2-298 | 208 | | H0188: 1, L0769: 1 | | |
| | | | | | | and L0753: 1. | | |
| HBNBB41 | 712676 | 103 | 50-256 | 209 | | H0188: 1 and L0748: 1. | | |
| HBNBB27 | 600905 | 104 | 143-3 | 210 | | H0188: 1 | | |
| | 847732 | 116 | 1-186 | 222 | | | | |
| HBNBB09 | 868924 | 105 | 372-79 | 211 | | L0439: 3 and H0188: 1. | | |
| HBNAW73 | 764716 | 106 | 87-236 | 212 | | H0188: 1 and L0748: 1. | | |
| HBNAC74 | 586797 | 107 | 3-152 | 213 | Asp-30 to Trp-36, | H0188: 1 | | |
| | | | | | Ser-39 to Trp-44. | | | |
| HBNAC71 | 525831 | 108 | 1-318 | 214 | Arg-10 to Glu-32. | H0188: 1 | | |
| HBNAC48 | 721983 | 109 | 150-308 | 215 | | H0188: 1 | | |
| HBNAC42 | 714263 | 110 | 1-120 | 216 | | H0188: 1 and L0591: 1. | | |
| HBNAC32 | 526549 | 111 | 1-111 | 217 | | H0188: 1 | | |
| HBNAC28 | 525832 | 112 | 34-183 | 218 | | H0188: 1 | | |
| HBNAC25 | 525834 | 113 | 3-146 | 219 | Leu-2 to Gln-11, | H0188: 1 | | |
| | | | | | Lys-35 to Lys-48. | | | |
| HBNAC09 | 525833 | 114 | 8-76 | 220 | | H0188: 1 | | |
| HBNAC02 | 921187 | 115 | 2-199 | 221 | Pro-24 to Ala-37. | H0188: 1 | | |

[0047] The first column in Table 1A provides a unique “Clone ID NO:Z” for a cDNA clone related to each contig sequence disclosed in Table 1A. This clone ID references the cDNA clone which contains at least the 5′ most sequence of the assembled contig, and at least a portion of SEQ ID NO:X was determined by directly sequencing the referenced clone. The reference clone may have more sequence than described in the sequence listing or the clone may have less. In the vast majority of cases, however, the clone is believed to encode a full-length polypeptide. In the case where a clone is not full-length, a full-length cDNA can be obtained by methods known in the art and/or as described elsewhere herein.

[0048] The second column in Table 1A provides a unique “Contig ID” identification for each contig sequence. The third column provides the “SEQ ID NO:X” identifier for each of the ovarian and/or breast associated contig polynucleotide sequences disclosed in Table 1A. The fourth column, “ORF (From-To)”, provides the location (i.e., nucleotide position numbers) within the polynucleotide sequence “SEQ ID NO:X” that delineate the preferred open reading frame (ORF) shown in the sequence listing and referenced in Table 1A, column 5, as SEQ ID NO:Y. Where the nucleotide position number “To” is lower than the nucleotide position number “From”, the preferred ORF is the reverse complement of the referenced polynucleotide sequence.

[0049] The fifth column in Table 1A provides the corresponding SEQ ID NO:Y for the polypeptide sequence encoded by the preferred ORF delineated in column 4. In one embodiment, the invention provides an amino acid sequence comprising, or alternatively consisting of, a polypeptide encoded by the portion of SEQ ID NO:X delineated by “ORF (From-To)”. Also provided are polynucleotides encoding such amino acid sequences and the complementary strand thereto.

[0050] Column 6 in Table 1A lists residues comprising epitopes contained in the polypeptides encoded by the preferred ORF (SEQ ID NO:Y), as predicted using the algorithm of Jameson and Wolf, (1988) Comp. Appl. Biosci. 4:181-186. The Jameson-Wolf antigenic analysis was performed using the computer program PROTEAN (Version 3.11 for the Power MacIntosh, DNASTAR, Inc., 1228 South Park Street Madison, Wis.). In specific embodiments, polypeptides of the invention comprise, or alternatively consist of, at least one, two, three, four, five or more of the predicted epitopes as described in Table 1A. It will be appreciated that depending on the analytical criteria used to predict antigenic determinants, the exact address of the determinant may vary slightly.

[0051] Column 7 in Table 1A provides an expression profile and library code: count for each of the contig sequences (SEQ ID NO:X) disclosed in Table 1A, which can routinely be combined with the information provided in Table 4 and used to determine the normal or diseased tissues, cells, and/or cell line libraries which predominantly express the polynucleotides of the invention. The first number in column 7 (preceding the colon), represents the tissue/cell source identifier code corresponding to the code and description provided in Table 4. For those identifier codes in which the first two letters are not “AR”, the second number in column 7 (following the colon) represents the number of times a sequence corresponding to the reference polynucleotide sequence was identified in the tissue/cell source. Those tissue/cell source identifier codes in which the first two letters are “AR” designate information generated using DNA array technology. Utilizing this technology, cDNAs were amplified by PCR and then transferred, in duplicate, onto the array. Gene expression was assayed through hybridization of first strand cDNA probes to the DNA array. cDNA probes were generated from total RNA extracted from a variety of different tissues and cell lines. Probe synthesis was performed in the presence of ³³P dCTP, using oligo(dT) to prime reverse transcription. After hybridization, high stringency washing conditions were employed to remove non-specific hybrids from the array. The remaining signal, emanating from each gene target, was measured using a Phosphorimager. Gene expression was reported as Phosphor Stimulating Luminescence (PSL) which reflects the level of phosphor signal generated from the probe hybridized to each of the gene targets represented on the array. A local background signal subtraction was performed before the total signal generated from each array was used to normalize gene expression between the different hybridizations. The value presented after “[array code]:” represents the mean of the duplicate values, following background subtraction and probe normalization. One of skill in the art could routinely use this information to identify normal and/or diseased tissue(s) which show a predominant expression pattern of the corresponding polynucleotide of the invention or to identify polynucleotides which show predominant and/or specific tissue and/or cell expression. The sequences disclosed herein have been determined to be predominantly expressed in ovarian and/or breast tissues, including normal and diseased ovarian and/or breast tissues (See Table 1A, column 7 and Table 4).

[0052] Column 8 in Table 1A provides a chromosomal map location for certain polynucleotides of the invention. Chromosomal location was determined by finding exact matches to EST and cDNA sequences contained in the NCBI (National Center for Biotechnology Information) UniGene database. Each sequence in the UniGene database is assigned to a “cluster”; all of the ESTs, cDNAs, and STSs in a cluster are believed to be derived from a single gene. Chromosomal mapping data is often available for one or more sequence(s) in a UniGene cluster; this data (if consistent) is then applied to the cluster as a whole. Thus, it is possible to infer the chromosomal location of a new polynucleotide sequence by determining its identity with a mapped UniGene cluster.

[0053] A modified version of the computer program BLASTN (Altshul et al., J. Mol. Biol. 215:403-410 (1990), and Gish et al., Nat. Genet. 3:266-272 (1993)) was used to search the UniGene database for EST or cDNA sequences that contain exact or near-exact matches to a polynucleotide sequence of the invention (the ‘Query’). A sequence from the UniGene database (the ‘Subject’) was said to be an exact match if it contained a segment of 50 nucleotides in length such that 48 of those nucleotides were in the same order as found in the Query sequence. If all of the matches that met this criteria were in the same UniGene cluster, and mapping data was available for this cluster, it is indicated in Table 1A under the heading “Cytologic Band”. Where a cluster had been further localized to a distinct cytologic band, that band is disclosed; where no banding information was available, but the gene had been localized to a single chromosome, the chromosome is disclosed.

[0054] Once a presumptive chromosomal location was determined for a polynucleotide of the invention, an associated disease locus was identified by comparison with a database of diseases which have been experimentally associated with genetic loci. The database used was the Morbid Map, derived from OMIM™ (supra). If the putative chromosomal location of a polynucleotide of the invention (Query sequence) was associated with a disease in the Morbid Map database, an OMIM reference identification number was noted in column 9, Table 1A, labeled “OMIM Disease Reference(s)”. Table 5 is a key to the OMIM reference identification numbers (column 1), and provides a description of the associated disease in Column 2.

TABLE 1B

| | | | | SEQ | |
|---|---|---|---|---|---|
| | | | | ID | |
| Clone ID | SEQ ID | CONTIG | | NO: | EXON |
| NO: Z | NO: X | ID: | BAC ID: A | B | From-To |
| HBNAN41 | 12 | 655842 | AC005729 | 223 | 1-307 |
| HBNAN41 | 12 | 655842 | AC005729 | 224 | 1-116 |
| HBNAN41 | 12 | 655842 | AC005729 | 225 | 1-177 |
| HBNAX71 | 14 | 530843 | AL157375 | 226 | 1-87 |
| HBNAX71 | 14 | 530843 | AL157375 | 227 | 1-430 |
| HBNAY58 | 15 | 558193 | AC046185 | 228 | 1-836 |
| HBNBT52 | 16 | 524869 | AC069303 | 229 | 1-488 |
| HBNBT52 | 16 | 524869 | AC069303 | 230 | 1-205 |
| HBNBT52 | 16 | 524869 | AC069303 | 231 | 1-315 |
| HMVDU41 | 17 | 957804 | AC019103 | 232 | 1-431 |
| HMVDU41 | 17 | 957804 | AC019103 | 233 | 1-148 |
| | | | | | 496-727 |
| HNBUR07 | 21 | 951814 | AP000424 | 234 | 1-418 |
| HNBUR07 | 21 | 951814 | AF205591 | 235 | 1-417 |
| HNBUR07 | 21 | 951814 | AP000424 | 236 | 1-828 |
| | | | | | 1172-1743 |
| HNBUR07 | 21 | 951814 | AF205591 | 237 | 1-670 |
| | | | | | 1172-1746 |
| HNOCT39 | 24 | 952611 | AC025840 | 238 | 1-733 |
| HNOCT39 | 24 | 952611 | AC025840 | 239 | 1-476 |
| HODER91 | 26 | 789661 | AL136109 | 240 | 1-3030 |
| | | | | | 3212-3814 |
| | | | | | 9089-9408 |
| | | | | | 11724-12242 |
| | | | | | 12308-12959 |
| | | | | | 23153-23254 |
| | | | | | 24314-26013 |
| HODER91 | 26 | 789661 | AC023147 | 241 | 1-3041 |
| | | | | | 3223-3825 |
| | | | | | 9096-9415 |
| | | | | | 11730-12248 |
| | | | | | 12314-12965 |
| | | | | | 23152-23259 |
| | | | | | 24319-26018 |
| HODER91 | 26 | 789661 | AC022219 | 242 | 1-3030 |
| | | | | | 3212-3814 |
| | | | | | 9084-9403 |
| | | | | | 11717-12235 |
| | | | | | 12301-12952 |
| | | | | | 23145-23246 |
| | | | | | 24307-26006 |
| HODER91 | 26 | 789661 | AL136109 | 243 | 1-344 |
| HODER91 | 26 | 789661 | AL136109 | 244 | 1-174 |
| HODER91 | 26 | 789661 | AC023147 | 245 | 1-122 |
| HODER91 | 26 | 789661 | AC022219 | 246 | 1-191 |
| HODER91 | 26 | 789661 | AC022219 | 247 | 1-344 |
| HOVAF17 | 27 | 576627 | AC010907 | 248 | 1-430 |
| HOVAF17 | 27 | 576627 | AC010907 | 249 | 1-131 |
| HOVAG49 | 29 | 927320 | AL355615 | 250 | 1-1030 |
| | | | | | 1130-1727 |
| HOVAG49 | 29 | 927320 | AL136082 | 251 | 1-1030 |
| | | | | | 1130-1727 |
| HOVAG49 | 29 | 927320 | AL355615 | 252 | 1-392 |
| HOVAG49 | 29 | 927320 | AL136082 | 253 | 1-392 |
| HOVAI41 | 30 | 670963 | AL136419 | 254 | 1-100 |
| HOVAI41 | 30 | 670963 | AL136419 | 255 | 1-146 |
| HOVBY34 | 32 | 706816 | AC006512 | 256 | 1-247 |
| | | | | | 2812-2918 |
| | | | | | 3488-3953 |
| | | | | | 3964-4527 |
| | | | | | 4683-5151 |
| | | | | | 5330-9121 |
| | | | | | 9884-10335 |
| | | | | | 10748-10781 |
| | | | | | 10960-11055 |
| | | | | | 11323-12111 |
| | | | | | 12127-12791 |
| | | | | | 12911-13262 |
| | | | | | 13266-13791 |
| | | | | | 14696-14866 |
| | | | | | 15107-15207 |
| | | | | | 16551-16955 |
| | | | | | 17174-17614 |
| | | | | | 18504-18749 |
| | | | | | 19392-19660 |
| | | | | | 19720-20075 |
| | | | | | 20785-21233 |
| | | | | | 21290-21733 |
| | | | | | 23618-23649 |
| | | | | | 23982-24188 |
| | | | | | 24481-24573 |
| | | | | | 24741-25003 |
| | | | | | 26591-26705 |
| | | | | | 26738-27249 |
| | | | | | 28479-28858 |
| | | | | | 29065-31669 |
| | | | | | 31926-32887 |
| | | | | | 33667-34293 |
| | | | | | 35229-35682 |
| | | | | | 38114-38771 |
| HOVBY34 | 32 | 706816 | AC025550 | 257 | 1-405 |
| HOVBY34 | 32 | 706816 | AC002357 | 258 | 1-1186 |
| HOVBY34 | 32 | 706816 | AC006512 | 259 | 1-818 |
| | | | | | 963-1440 |
| | | | | | 1469-1958 |
| | | | | | 2220-3076 |
| | | | | | 3455-3663 |
| | | | | | 3931-4285 |
| | | | | | 4549-4632 |
| | | | | | 4696-5069 |
| | | | | | 5245-5337 |
| | | | | | 5461-5775 |
| HOVBY34 | 32 | 706816 | AC006512 | 260 | 1-738 |
| HOVCA52 | 34 | 727170 | AC025741 | 261 | 1-696 |
| HOVCI76 | 36 | 858845 | AL049694 | 262 | 1-469 |
| HOVCI76 | 36 | 858845 | AL049694 | 263 | 1-476 |
| HOVCJ24 | 38 | 858844 | AC005096 | 264 | 1-364 |
| HOVCJ24 | 38 | 858844 | AC005096 | 265 | 1-452 |
| HOVCJ24 | 38 | 858844 | AC005096 | 266 | 1-161 |
| HOVCO11 | 39 | 970814 | AC004520 | 267 | 1-3242 |
| HOVCO11 | 39 | 970814 | AC010677 | 268 | 1-1724 |
| | | | | | 1877-2444 |
| | | | | | 2754-3600 |
| | | | | | 3759-3976 |
| | | | | | 4113-4236 |
| | | | | | 4295-4403 |
| | | | | | 4868-5153 |
| | | | | | 5486-5685 |
| | | | | | 5729-6209 |
| | | | | | 6382-6482 |
| | | | | | 6747-7765 |
| | | | | | 7838-11596 |
| HOVCO11 | 39 | 970814 | AC004520 | 269 | 1-423 |
| HOVCO11 | 39 | 970814 | AC010677 | 270 | 1-41 |
| | | | | | 3758-5500 |
| | | | | | 5561-8116 |
| | | | | | 8808-8972 |
| | | | | | 10854-11380 |
| | | | | | 13142-13690 |
| | | | | | 14343-15093 |
| | | | | | 15286-15643 |
| | | | | | 15801-16163 |
| HOVCO58 | 40 | 736065 | AC018665 | 271 | 1-416 |
| HOVCQ47 | 41 | 496190 | AL354979 | 272 | 1-1421 |
| HOVEV01 | 44 | 914553 | AL359092 | 273 | 1-116 |
| HOVEV01 | 44 | 914553 | AC009453 | 274 | 1-143 |
| HOVEV01 | 44 | 914553 | AC025036 | 275 | 1-148 |
| HOVEV01 | 44 | 914553 | AC016327 | 276 | 1-125 |
| HOVEV01 | 44 | 914553 | AC022231 | 277 | 1-151 |
| HOVEV01 | 44 | 914553 | AC022232 | 278 | 1-152 |
| HOVEV01 | 44 | 914553 | AC048342 | 279 | 1-130 |
| HOVEV01 | 44 | 914553 | AC048342 | 280 | 1-118 |
| HOVEU06 | 46 | 933737 | AL356240 | 281 | 1-406 |
| HOVEU06 | 46 | 933737 | AC021202 | 282 | 1-406 |
| HOVEO04 | 47 | 926209 | AC009763 | 283 | 1-37 |
| | | | | | 612-789 |
| | | | | | 1387-1596 |
| | | | | | 2329-2749 |
| HOVEO04 | 47 | 926209 | AC008751 | 284 | 1-37 |
| | | | | | 610-787 |
| | | | | | 1383-1592 |
| | | | | | 2325-2745 |
| HOVEO04 | 47 | 926209 | AC009763 | 285 | 1-577 |
| HOVEO04 | 47 | 926209 | AC008751 | 286 | 1-575 |
| HOVDD10 | 50 | 961887 | AC013555 | 287 | 1-589 |
| HOVDD10 | 50 | 961887 | AC013555 | 288 | 1-3604 |
| HOVCO50 | 52 | 932544 | AC011743 | 289 | 1-310 |
| | | | | | 1101-3106 |
| | | | | | 3478-4052 |
| | | | | | 4404-7119 |
| | | | | | 7315-7492 |
| | | | | | 7591-7677 |
| | | | | | 7702-8144 |
| | | | | | 8377-8410 |
| | | | | | 8495-9117 |
| | | | | | 9222-9386 |
| | | | | | 9534-10411 |
| | | | | | 10577-10783 |
| | | | | | 10903-11076 |
| HOVCO50 | 52 | 932544 | AC009948 | 290 | 1-195 |
| | | | | | 436-930 |
| | | | | | 2047-2366 |
| | | | | | 3235-3687 |
| | | | | | 4129-4425 |
| | | | | | 5291-7148 |
| | | | | | 7368-7956 |
| | | | | | 8617-9180 |
| | | | | | 9370-9679 |
| | | | | | 10470-12475 |
| | | | | | 12847-13421 |
| | | | | | 13773-15659 |
| | | | | | 15770-16487 |
| | | | | | 16683-16860 |
| | | | | | 17070-17512 |
| | | | | | 17745-17778 |
| | | | | | 17863-18485 |
| | | | | | 18590-18754 |
| | | | | | 18902-19779 |
| | | | | | 19945-20150 |
| | | | | | 20271-20444 |
| HOVCO50 | 52 | 932544 | AC011743 | 291 | 1-521 |
| HOVCO50 | 52 | 932544 | AC011743 | 292 | 1-564 |
| HOVCO50 | 52 | 932544 | AC009948 | 293 | 1-521 |
| HOVCO50 | 52 | 932544 | AC009948 | 294 | 1-588 |
| HOVCM77 | 54 | 772208 | AC013452 | 295 | 1-31 |
| | | | | | 1058-1160 |
| | | | | | 3236-3744 |
| | | | | | 4308-4731 |
| | | | | | 4830-5384 |
| | | | | | 5754-5981 |
| HOVCM77 | 54 | 772208 | AC036102 | 296 | 1-31 |
| | | | | | 1059-1161 |
| | | | | | 3237-3745 |
| | | | | | 4309-4732 |
| | | | | | 4831-5385 |
| | | | | | 5755-5982 |
| HOVCM77 | 54 | 772208 | AC069073 | 297 | 1-808 |
| HOVCM77 | 54 | 772208 | AC069073 | 298 | 1-192 |
| HOVCM03 | 55 | 924196 | AC008026 | 299 | 1-691 |
| HOVCM03 | 55 | 924196 | AC018636 | 300 | 1-1712 |
| | | | | | 1781-2220 |
| | | | | | 2775-3125 |
| | | | | | 4267-4398 |
| | | | | | 4943-5119 |
| | | | | | 5395-6479 |
| | | | | | 6593-6736 |
| | | | | | 8582-8759 |
| | | | | | 9851-10352 |
| | | | | | 10560-11273 |
| | | | | | 11554-11699 |
| | | | | | 13092-13782 |
| | | | | | 13894-14174 |
| | | | | | 14184-16225 |
| HOVCM03 | 55 | 924196 | AC023982 | 301 | 1-614 |
| HOVCM03 | 55 | 924196 | AC018636 | 302 | 1-687 |
| HOVCM03 | 55 | 924196 | AC018636 | 303 | 1-382 |
| HOVCM03 | 55 | 924196 | AC023982 | 304 | 1-439 |
| HOVCI89 | 56 | 786917 | Z99289 | 305 | 1-165 |
| | | | | | 2231-2370 |
| | | | | | 3629-5021 |
| | | | | | 5116-6302 |
| HOVCI89 | 56 | 786917 | Z99289 | 306 | 1-282 |
| HOVCI89 | 56 | 786917 | Z99289 | 307 | 1-110 |
| HOVBK69 | 61 | 757594 | AC048347 | 308 | 1-537 |
| HOVBK69 | 61 | 757594 | AC009319 | 309 | 1-536 |
| HOVBK69 | 61 | 757594 | AC048347 | 310 | 1-299 |
| HOVBK69 | 61 | 757594 | AC048347 | 311 | 1-147 |
| HOVBK69 | 61 | 757594 | AC009319 | 312 | 1-303 |
| HOVBK69 | 61 | 757594 | AC009319 | 313 | 1-193 |
| HOVBK38 | 62 | 956238 | AC006251 | 314 | 1-442 |
| | | | | | 1222-2085 |
| | | | | | 2175-2409 |
| | | | | | 3314-3530 |
| | | | | | 5391-5542 |
| | | | | | 5894-6556 |
| | | | | | 7350-7446 |
| | | | | | 8455-8563 |
| | | | | | 9344-9752 |
| | | | | | 10389-10933 |
| | | | | | 14295-14691 |
| | | | | | 14714-14982 |
| | | | | | 17146-17504 |
| | | | | | 21039-21150 |
| | | | | | 21264-21477 |
| | | | | | 21774-21936 |
| HOVBK38 | 62 | 956238 | AC006251 | 315 | 1-323 |
| HOVBK38 | 62 | 956238 | AC006251 | 316 | 1-289 |
| | | | | | 371-500 |
| | | | | | 1108-1518 |
| | | | | | 2170-2282 |
| | | | | | 3050-3088 |
| | | | | | 4088-4145 |
| | | | | | 4455-4519 |
| | | | | | 4790-5047 |
| | | | | | 5422-5806 |
| | | | | | 5933-6678 |
| | | | | | 6727-7444 |
| HOVBI67 | 64 | 751665 | AC004975 | 317 | 1-1090 |
| | | | | | 1399-1517 |
| | | | | | 2019-2457 |
| | | | | | 4390-4835 |
| | | | | | 5859-6444 |
| | | | | | 8606-8937 |
| | | | | | 8979-9108 |
| | | | | | 10450-10806 |
| | | | | | 10853-12075 |
| | | | | | 12331-13044 |
| | | | | | 13247-13372 |
| | | | | | 13940-14357 |
| | | | | | 17262-17662 |
| | | | | | 19647-21441 |
| HOVAZ65 | 67 | 750273 | AP000627 | 318 | 1-1082 |
| HOVAZ65 | 67 | 750273 | AP000730 | 319 | 1-1836 |
| | | | | | 1991-2508 |
| HOVAZ65 | 67 | 750273 | AP000870 | 320 | 1-1836 |
| | | | | | 1991-2508 |
| HOVAY42 | 70 | 713812 | AC023046 | 321 | 1-364 |
| HOVAY42 | 70 | 713812 | AC023046 | 322 | 1-105 |
| HOVAY42 | 70 | 713812 | AC023046 | 323 | 1-210 |
| HOVAY03 | 71 | 921959 | AP002789 | 324 | 1-308 |
| HOVAY03 | 71 | 921959 | AP002789 | 325 | 1-247 |
| HOVAO25 | 73 | 678163 | AC026149 | 326 | 1-374 |
| HOVAO25 | 73 | 678163 | AC026149 | 327 | 1-352 |
| HOVAO25 | 73 | 678163 | AC026149 | 328 | 1-518 |
| HOVAC77 | 79 | 578783 | AC023158 | 329 | 1-396 |
| HOVAB61 | 83 | 578791 | AL096827 | 330 | 1-667 |
| HOVAB61 | 83 | 578791 | AL096827 | 331 | 1-139 |
| HOVAB61 | 83 | 578791 | AL096827 | 332 | 1-1322 |
| HOOAB23 | 84 | 522227 | AC051654 | 333 | 1-129 |
| | | | | | 832-1405 |
| HOOAB23 | 84 | 522227 | AC068345 | 334 | 1-855 |
| | | | | | 1558-2131 |
| HOOAB23 | 84 | 522227 | AC068345 | 335 | 1-203 |
| HONAK10 | 86 | 968610 | AC023105 | 336 | 1-3282 |
| | | | | | 3292-5377 |
| HONAK10 | 86 | 968610 | AC023105 | 337 | 1-1914 |
| | | | | | 1958-2384 |
| HONAH06 | 87 | 936029 | AC022286 | 338 | 1-1132 |
| HONAH06 | 87 | 936029 | AC005355 | 339 | 1-33 |
| HONAH06 | 87 | 936029 | AC002369 | 340 | 1-1333 |
| | | | | | 1663-1760 |
| | | | | | 2438-2530 |
| | | | | | 4503-5088 |
| HONAH06 | 87 | 936029 | AC005730 | 341 | 1-1130 |
| HONAH06 | 87 | 936029 | AC002369 | 342 | 1-228 |
| HONAH06 | 87 | 936029 | AC005730 | 343 | 1-887 |
| HONAH06 | 87 | 936029 | AC005730 | 344 | 1-192 |
| HONAE50 | 88 | 723571 | AC073160 | 345 | 1-749 |
| HONAE50 | 88 | 723571 | AC027507 | 346 | 1-749 |
| HONAE50 | 88 | 723571 | AC027507 | 347 | 1-158 |
| HONAE50 | 88 | 723571 | AC073160 | 348 | 1-158 |
| HONAD65 | 89 | 747152 | AL138904 | 349 | 1-474 |
| | | | | | 705-1039 |
| | | | | | 1625-1999 |
| HONAD65 | 89 | 747152 | AL354990 | 350 | 1-474 |
| | | | | | 705-1039 |
| | | | | | 1625-1999 |
| HONAD65 | 89 | 747152 | AL138904 | 351 | 1-511 |
| HONAD65 | 89 | 747152 | AL354990 | 352 | 1-511 |
| HONAD65 | 89 | 747152 | AL138904 | 353 | 1-210 |
| HONAD65 | 89 | 747152 | AL354990 | 354 | 1-210 |
| HNOAD04 | 92 | 926258 | AC069278 | 355 | 1-741 |
| HNOAD04 | 92 | 926258 | AC069278 | 356 | 1-698 |
| | | | | | 1008-1383 |
| HNOAD04 | 92 | 926258 | AC069278 | 357 | 1-2222 |
| HNBVH02 | 93 | 917719 | AL355822 | 358 | 1-103 |
| | | | | | 170-600 |
| | | | | | 780-1088 |
| | | | | | 1296-1647 |
| | | | | | 2086-2390 |
| | | | | | 3428-3714 |
| | | | | | 3745-4698 |
| | | | | | 5342-10951 |
| HNBVH02 | 93 | 917719 | AL117354 | 359 | 1-103 |
| | | | | | 170-600 |
| | | | | | 780-1088 |
| | | | | | 1296-1647 |
| | | | | | 2085-2407 |
| | | | | | 3742-4775 |
| | | | | | 4783-4893 |
| | | | | | 5339-10949 |
| HNBVH02 | 93 | 917719 | AL355822 | 360 | 1-389 |
| HNBVH02 | 93 | 917719 | AL117354 | 361 | 1-389 |
| HNBVC03 | 94 | 922402 | AC017099 | 362 | 1-396 |
| | | | | | 510-858 |
| | | | | | 1026-1198 |
| | | | | | 2607-2761 |
| HNBVC03 | 94 | 922402 | AC017099 | 363 | 1-196 |
| HNBUQ06 | 95 | 933673 | AC022558 | 364 | 1-133 |
| | | | | | 1253-1381 |
| | | | | | 2940-3076 |
| | | | | | 3160-3199 |
| | | | | | 3860-3985 |
| | | | | | 4129-4569 |
| | | | | | 5374-5488 |
| | | | | | 5932-7588 |
| HNBUQ06 | 95 | 933673 | AC022558 | 365 | 1-373 |
| HNBUQ06 | 95 | 933673 | AC022558 | 366 | 1-374 |
| HNBUI10 | 97 | 961734 | AC010990 | 367 | 1-227 |
| | | | | | 339-1923 |
| | | | | | 1947-2413 |
| | | | | | 2498-2672 |
| HBNBL29 | 100 | 703113 | AC008915 | 368 | 1-1744 |
| HBNBL29 | 100 | 703113 | AC008915 | 369 | 1-420 |
| HBNBJ29 | 101 | 907015 | AC036160 | 370 | 1-334 |
| HBNBJ29 | 101 | 907015 | AC016995 | 371 | 1-334 |
| HBNBJ29 | 101 | 907015 | AC036160 | 372 | 1-470 |
| HBNBJ29 | 101 | 907015 | AC036160 | 373 | 1-99 |
| HBNBJ29 | 101 | 907015 | AC016995 | 374 | 1-99 |
| HBNBJ29 | 101 | 907015 | AC016995 | 375 | 1-470 |
| HBNBJ06 | 102 | 960664 | AC061996 | 376 | 1-527 |
| HBNBJ06 | 102 | 960664 | AC022579 | 377 | 1-173 |
| | | | | | 1341-1867 |
| | | | | | 4892-4933 |
| HBNBJ06 | 102 | 960664 | AC022579 | 378 | 1-492 |
| HBNBB09 | 105 | 868924 | AL365223 | 379 | 1-73 |
| | | | | | 2336-3428 |
| HBNBB09 | 105 | 868924 | AL365223 | 380 | 1-851 |
| HBNAW73 | 106 | 764716 | Z99289 | 381 | 1-1491 |
| HBNAW73 | 106 | 764716 | Z99289 | 382 | 1-110 |
| HBNAW73 | 106 | 764716 | Z99289 | 383 | 1-190 |
| | | | | | 1730-1923 |
| | | | | | 2881-3366 |
| | | | | | 4302-4465 |
| | | | | | 4635-5036 |
| | | | | | 6198-6347 |
| | | | | | 6938-7175 |
| | | | | | 7445-7543 |
| | | | | | 7995-8128 |
| | | | | | 12062-13446 |
| | | | | | 13544-14273 |
| HBNAC32 | 111 | 526549 | AC018648 | 384 | 1-855 |
| | | | | | 1191-1323 |
| | | | | | 3823-3881 |
| | | | | | 4371-5379 |
| HBNAC32 | 111 | 526549 | AC018648 | 385 | 1-125 |
| | | | | | 180-388 |
| | | | | | 891-1383 |
| | | | | | 1802-1965 |
| | | | | | 2065-2506 |
| HBNAC28 | 112 | 525832 | AC007539 | 386 | 1-728 |
| HBNAC09 | 114 | 525833 | AL132713 | 387 | 1-2438 |
| HBNAC09 | 114 | 525833 | AL132713 | 388 | 1-355 |
| | | | | | 392-835 |
| | | | | | 914-995 |
| | | | | | 1054-1333 |
| | | | | | 1586-1743 |
| | | | | | 2135-2199 |
| HBNAC09 | 114 | 525833 | AL132713 | 389 | 1-124 |
| HBNAC02 | 115 | 921187 | AL133523 | 390 | 1-188 |
| HBNAC02 | 115 | 921187 | AL133523 | 391 | 1-1700 |
| | | | | | 1768-2230 |
| | | | | | 2511-2678 |
| | | | | | 3146-6917 |
| | | | | | 8428-8644 |
| | | | | | 8873-9205 |
| | | | | | 11616-11679 |
| | | | | | 14711-14834 |
| | | | | | 15647-16163 |
| | | | | | 17626-17691 |
| | | | | | 18185-18607 |
| | | | | | 20796-20845 |
| HBNAC02 | 115 | 921187 | AL133523 | 392 | 1-113 |
| | | | | | 2404-2767 |
| | | | | | 2862-3319 |
| | | | | | 3371-3750 |
| | | | | | 3847-4180 |
| | | | | | 6007-6752 |
| | | | | | 8810-9371 |

[0055] Table 1B summarizes additional polynucleotides encompassed by the invention (including cDNA clones related to the sequences (Clone ID NO:Z), contig sequences (contig identifier (Contig ID:) contig nucleotide sequence identifiers (SEQ ID NO:X)), and genomic sequences (SEQ ID NO:B). The first column provides a unique clone identifier, “Clone ID NO:Z”, for a cDNA clone related to each contig sequence. The second column provides the sequence identifier, “SEQ ID NO:X”, for each contig sequence. The third column provides a unique contig identifier, “Contig ID:” for each contig sequence. The fourth column, provides a BAC identifier “BAC ID NO:A” for the BAC clone referenced in the corresponding row of the table. The fifth column provides the nucleotide sequence identifier, “SEQ ID NO:B” for a fragment of the BAC clone identified in column four of the corresponding row of the table. The sixth column, “Exon From-To”, provides the location (i.e., nucleotide position numbers) within the polynucleotide sequence of SEQ ID NO:B which delineate certain polynucleotides of the invention that are also exemplary members of polynucleotide sequences that encode polypeptides of the invention (e.g., polypeptides containing amino acid sequences encoded by the polynucleotide sequences delineated in column six, and fragments and variants thereof).

TABLE 2

| | | SEQ | | | | Score/ | | |
|---|---|---|---|---|---|---|---|---|
| Clone ID | Contig | ID | Analysis | | PFam/NR Accession | Percent | NT | NT |
| NO: Z | ID: | NO: X | Method | PFam/NR Description | Number | Identity | From | To |
| HBNAY58 | 558193 | 15 | blastx.2 | human elongation | emb\|CAA79716.1\| | 73% | 263 | 400 |
| | | | | factor-1-delta [Homo | | | | |
| | | | | sapiens] | | | | |
| HNOAX12 | 969363 | 22 | blastx.2 | line-1 reverse | gb\|AAC51337.1\| | 41% | 710 | 465 |
| | | | | transcriptase [Homo | | | | |
| | | | | sapiens] | | | | |
| HODER91 | 789661 | 26 | HMMER | PFAM: Zinc finger, | PF00096 | 11.06 | 163 | 225 |
| | | | 1.8 | C2H2 type | | | | |
| | | | blastx.2 | (AC007059) Human | gb\|AAD19818.1\| | 35% | 1 | 294 |
| | | | | homolog of Mus | | | | |
| | | | | musculus wizL protein | | | | |
| | | | | [AA 4-1561] [Homo | | | | |
| | | | | sapiens] | | | | |
| HOVBY34 | 706816 | 32 | blastx.2 | (AK002129) unnamed | dbj\|BAA92096.1\| | 80% | 177 | 40 |
| | | | | protein product [Homo | | | | |
| | | | | sapiens] | | | | |
| HOVCD39 | 705406 | 35 | blastx.2 | (AF118081) PRO1900 | gb\|AAF22025.1\| | 70% | 20 | 151 |
| | | | | [Homo sapiens] | AF118094_{—20} | | | |
| HWLHJ68 | 957834 | 43 | HMMER | PFAM: Zinc finger, | PF00096 | 6.35 | 216 | 278 |
| | | | 1.8 | C2H2 type | | | | |
| | | | blastx.14 | (AB012265) wizL | gi\|3551182\|dbj\| | 55% | 201 | 314 |
| | | | | [Mus musculus] | BAA32790.1\| | 39% | 101 | 169 |
| HOVEE20 | 909030 | 48 | HMMER | PFAM: KRAB box | PF01352 | 105.4 | 229 | 348 |
| | | | 2.1.1 | | | | | |
| | | | blastx.14 | zinc finger protein 30 | gi\|456269\|emb\| | 67% | 193 | 348 |
| | | | | [Mus musculus | CAA82913.1\| | 33% | 367 | 429 |
| | | | | domesticus] | | | | |
| HOVCO50 | 932544 | 52 | HMMER | PFAM: Zinc-binding | PF00099 | 2.22 | 464 | 508 |
| | | | 1.8 | metalloprotease | | | | |
| | | | | domain | | | | |
| | | | blastx.14 | (AF072860) protein | gi\|3290198\|gb\| | 82% | 458 | 577 |
| | | | | activator of the 1 | AAC25672.1\| | 43% | 204 | 251 |
| HONAD02 | 859016 | 90 | HMMER | PFAM: Polyprenyl | PF00348 | 38.5 | 753 | 905 |
| | | | 2.1.1 | synthetases | | | | |

[0056] Table 2 further characterizes certain encoded polypeptides of the invention, by providing the results of comparisons to protein and protein family databases. The first column provides a unique clone identifier, “Clone ID NO:”, corresponding to a cDNA clone disclosed in Table 1A. The second column provides the unique contig indentifier, “Contig ID:” which allows correlation with the information in Table IA. The third column provides the sequence identifier, “SEQ ID NO:X”, for the contig polynucleotide sequences. The fourth column provides the analysis method by which the homology/identity disclosed in the row was determined. The fifth column provides a description of PFam/NR hits having significant matches identified by each analysis. Column six provides the accession number of the PFam/NR hit disclosed in the fifth column. Column seven, “Score/Percent Identity”, provides a quality score or the percent identity, of the hit disclosed in column five. Comparisons were made between polypeptides encoded by polynucleotides of the invention and a non-redundant protein database (herein referred to as “NR”), or a database of protein families (herein referred to as “PFam”), as described below.

[0057] The NR database, which comprises the NBRF PIR database, the NCBI GenPept database, and the SIB SwissProt and TrEMBL databases, was made non-redundant using the computer program nrdb2 (Warren Gish, Washington University in Saint Louis). Each of the polynucleotides shown in Table 1A, column 3 (e.g., SEQ ID NO:X or the ‘Query’ sequence) was used to search against the NR database. The computer program BLASTX was used to compare a 6-frame translation of the Query sequence to the NR database (for information about the BLASTX algorithm please see Altshul et al., J. Mol. Biol. 215:403-410 (1990), and Gish et al., Nat. Genet. 3:266-272 (1993)). A description of the sequence that is most similar to the Query sequence (the highest scoring ‘Subject’) is shown in column five of Table 2 and the database accession number for that sequence is provided in column six. The highest scoring ‘Subject’ is reported in Table 2 if (a) the estimated probability that the match occurred by chance alone is less than 1.0e-07, and (b) the match was not to a known repetitive element. BLASTX returns alignments of short polypeptide segments of the Query and Subject sequences which share a high degree of similarity; these segments are known as High-Scoring Segment Pairs or HSPs. Table 2 reports the degree of similarity between the Query and the Subject for each HSP as a percent identity in Column 7. The percent identity is determined by dividing the number of exact matches between the two aligned sequences in the HSP, dividing by the number of Query aminoacids in the HSP and multiplying by 100. The polynucleotides of SEQ ID NO:X which encode the polypeptide sequence that generates an HSP are delineated by columns 8 and 9 of Table 2.

[0058] The PFam database, PFam version 5.2, (Sonnhammer et al., Nucl. Acids Res., 26:320-322, (1998)) consists of a series of multiple sequence alignments; one alignment for each protein family. Each multiple sequence alignment is converted into a probability model called a Hidden Markov Model, or HMM, that represents the position-specific variation among the sequences that make up the multiple sequence alignment (see, e.g., R. Durbin et al., Biological sequence analysis: probabilistic models of proteins and nucleic acids, Cambridge University Press, 1998 for the theory of HMMs). The program HMMER version 1.8 (Sean Eddy, Washington University in Saint Louis) was used to compare the predicted protein sequence for each Query sequence (SEQ ID NO:Y in Table 1A) to each of the HMMs derived from PFam version 5.2. A HMM derived from PFam version 5.2 was said to be a significant match to a polypeptide of the invention if the score returned by HMMER 1.8 was greater than 0.8 times the HMMER 1.8 score obtained with the most distantly related known member of that protein family. The description of the PFam family which shares a significant match with a polypeptide of the invention is listed in column 5 of Table 2, and the database accession number of the PFam hit is provided in column 6. Column 7 provides the score returned by HMMER version 1.8 for the alignment. Columns 8 and 9 delineate the polynucleotides of SEQ ID NO:X which encode the polypeptide sequence which shows a significant match to a PFam protein family.

[0059] As mentioned, columns 8 and 9 in Table 2, “NT From” and “NT To”, delineate the polynucleotides of “SEQ ID NO:X” that encode a polypeptide having a significant match to the PFam/NR database as disclosed in the fifth column of Table 2. In one embodiment, the invention provides a protein comprising, or alternatively consisting of, a polypeptide encoded by the polynucleotides of SEQ ID NO:X delineated in columns 8 and 9 of Table 2. Also provided are polynucleotides encoding such proteins, and the complementary strand thereto.

[0060] The nucleotide sequence SEQ ID NO:X and the translated SEQ ID NO:Y are sufficiently accurate and otherwise suitable for a variety of uses well known in the art and described further below. For instance, the nucleotide sequences of SEQ ID NO:X are useful for designing nucleic acid hybridization probes that will detect nucleic acid sequences contained in SEQ ID NO:X or the cDNA contained in Clone ID NO:Z. These probes will also hybridize to nucleic acid molecules in biological samples, thereby enabling immediate applications in chromosome mapping, linkage analysis, tissue identification and/or typing, and a variety of forensic and diagnostic methods of the invention. Similarly, polypeptides identified from SEQ ID NO:Y may be used to generate antibodies which bind specifically to these polypeptides, or fragments thereof, and/or to the polypeptides encoded by the cDNA clones identified in, for example, Table 1A.

[0061] Nevertheless, DNA sequences generated by sequencing reactions can contain sequencing errors. The errors exist as misidentified nucleotides, or as insertions or deletions of nucleotides in the generated DNA sequence. The erroneously inserted or deleted nucleotides cause frame shifts in the reading frames of the predicted amino acid sequence. In these cases, the predicted amino acid sequence diverges from the actual amino acid sequence, even though the generated DNA sequence may be greater than 99.9% identical to the actual DNA sequence (for example, one base insertion or deletion in an open reading frame of over 1000 bases).

[0062] Accordingly, for those applications requiring precision in the nucleotide sequence or the amino acid sequence, the present invention provides not only the generated nucleotide sequence identified as SEQ ID NO:X, and a predicted translated amino acid sequence identified as SEQ ID NO:Y, but also a sample of plasmid DNA containing cDNA Clone ID NO:Z (deposited with the ATCC on Oct. 5, 2000, and receiving ATCC designation numbers PTA 2574 and PTA 2575; deposited with the ATCC on Jan. 5, 2001, having the depositor reference numbers TS-1, TS-2, AC-1, and AC-2; and/or as set forth, for example, in Table 1A, 6 and 7). The nucleotide sequence of each deposited clone can readily be determined by sequencing the deposited clone in accordance with known methods. Further, techniques known in the art can be used to verify the nucleotide sequences of SEQ ID NO:X.niques known in the art can be used to verify the nucleotide sequences of SEQ ID NO:X.

[0063] The predicted amino acid sequence can then be verified from such deposits. Moreover, the amino acid sequence of the protein encoded by a particular clone can also be directly determined by peptide sequencing or by expressing the protein in a suitable host cell containing the deposited human cDNA, collecting the protein, and determining its sequence.

[0064] RACE Protocol for Recovery of Full-Length Genes

[0065] Partial cDNA clones can be made full-length by utilizing the rapid amplification of cDNA ends (RACE) procedure described in Frohman, M. A., et al., Proc. Nat'l. Acad. Sci. USA, 85:8998-9002 (1988). A cDNA clone missing either the 5′ or 3′ end can be reconstructed to include the absent base pairs extending to the translational start or stop codon, respectively. In some cases, cDNAs are missing the start codon of translation. The following briefly describes a modification of this original 5′ RACE procedure. Poly A+ or total RNA is reverse transcribed with Superscript II (Gibco/BRL) and an antisense or complementary primer specific to the cDNA sequence. The primer is removed from the reaction with a Microcon Concentrator (Amicon). The first-strand cDNA is then tailed with dATP and terminal deoxynucleotide transferase (Gibco/BRL). Thus, an anchor sequence is produced which is needed for PCR amplification. The second strand is synthesized from the dA-tail in PCR buffer, Taq DNA polymerase (Perkin-Elmer Cetus), an oligo-dT primer containing three adjacent restriction sites (XhoI, SalI and ClaI) at the 5′ end and a primer containing just these restriction sites. This double-stranded cDNA is PCR amplified for 40 cycles with the same primers as well as a nested cDNA-specific antisense primer. The PCR products are size-separated on an ethidium bromide-agarose gel and the region of gel containing cDNA products the predicted size of missing protein-coding DNA is removed. cDNA is purified from the agarose with the Magic PCR Prep kit (Promega), restriction digested with XhoI or SalI, and ligated to a plasmid such as pBluescript SKII (Stratagene) at XhoI and EcoRV sites. This DNA is transformed into bacteria and the plasmid clones sequenced to identify the correct protein-coding inserts. Correct 5′ ends are confirmed by comparing this sequence with the putatively identified homologue and overlap with the partial cDNA clone Similar methods known in the art and/or commercial kits are used to amplify and recover 3′ ends.

[0066] Several quality-controlled kits are commercially available for purchase. Similar reagents and methods to those above are supplied in kit form from Gibco/BRL for both 5′ and 3′ RACE for recovery of full length genes. A second kit is available from Clontech which is a modification of a related technique, SLIC (single-stranded ligation to single-stranded cDNA), developed by Dumas et al., Nucleic Acids Res., 19:5227-32 (1991). The major differences in procedure are that the RNA is alkaline hydrolyzed after reverse transcription and RNA ligase is used to join a restriction site-containing anchor primer to the first-strand cDNA. This obviates the necessity for the da-tailing reaction which results in a polyT stretch that is difficult to sequence past.

[0067] An alternative to generating 5′ or 3′ cDNA from RNA is to use cDNA library double-stranded DNA. An asymmetric PCR-amplified antisense cDNA strand is synthesized with an antisense cDNA-specific primer and a plasmid-anchored primer. These primers are removed and a symmetric PCR reaction is performed with a nested cDNA-specific antisense primer and the plasmid-anchored primer.

[0068] RNA Ligase Protocol for Generating the 5′ or 3′ End Sequences to Obtain Full Length Genes

[0069] Once a gene of interest is identified, several methods are available for the identification of the 5′ or 3′ portions of the gene which may not be present in the original cDNA plasmid. These methods include, but are not limited to, filter probing, clone enrichment using specific probes and protocols similar and identical to 5′ and 3′ RACE. While the full length gene may be present in the library and can be identified by probing, a useful method for generating the 5′ or 3′ end is to use the existing sequence information from the original cDNA to generate the missing information. A method similar to 5′ RACE is available for generating the missing 5′ end of a desired full-length gene. (This method was published by Fromont-Racine et al., Nucleic Acids Res., 21(7):1683-1684 (1993)). Briefly, a specific RNA oligonucleotide is ligated to the 5′ ends of a population of RNA presumably containing full-length gene RNA transcript. A primer set containing a primer specific to the ligated RNA oligonucleotide and a primer specific to a known sequence of the gene of interest, is used to PCR amplify the 5′ portion of the desired full length gene which may then be sequenced and used to generate the full length gene. This method starts with total RNA isolated from the desired source, poly A RNA may be used but is not a prerequisite for this procedure. The RNA preparation may then be treated with phosphatase if necessary to eliminate 5′ phosphate groups on degraded or damaged RNA which may interfere with the later RNA ligase step. The phosphatase if used is then inactivated and the RNA is treated with tobacco acid pyrophosphatase in order to remove the cap structure present at the 5′ ends of messenger RNAs. This reaction leaves a 5′ phosphate group at the 5′ end of the cap cleaved RNA which can then be ligated to an RNA oligonucleotide using T4 RNA ligase. This modified RNA preparation can then be used as a template for first strand cDNA synthesis using a gene specific oligonucleotide. The first strand synthesis reaction can then be used as a template for PCR amplification of the desired 5′ end using a primer specific to the ligated RNA oligonucleotide and a primer specific to the known sequence of the ovarian and/or breast antigen of interest. The resultant product is then sequenced and analyzed to confirm that the 5′ end sequence belongs to the relevant ovarian and/or breast antigen.

[0070] The present invention also relates to vectors or plasmids, which include such DNA sequences, as well as the use of the DNA sequences. The material deposited with the ATCC (deposited with the ATCC on Oct. 5, 2000, and receiving ATCC designation numbers PTA 2574 and PTA 2575; deposited with the ATCC on Jan. 5, 2001, having the depositor reference numbers TS-1, TS-2, AC-1, and AC-2; and/or as set forth, for example, in Table 1A, 6 and 7) is a mixture of cDNA clones derived from a variety of human tissue and cloned in either a plasmid vector or a phage vector, as shown, for example, in Table 7. These deposits are referred to as “the deposits” herein. The tissues from which some of the clones were derived are listed in Table 7, and the vector in which the corresponding cDNA is contained is also indicated in Table 7. The deposited material includes cDNA clones corresponding to SEQ ID NO:X described, for example, in Table 1A (Clone ID NO:Z). A clone which is isolatable from the ATCC Deposits by use of a sequence listed as SEQ ID NO:X, may include the entire coding region of a human gene or in other cases such clone may include a substantial portion of the coding region of a human gene. Furthermore, although the sequence listing may in some instances list only a portion of the DNA sequence in a clone included in the ATCC Deposits, it is well within the ability of one skilled in the art to sequence the DNA included in a clone contained in the ATCC Deposits by use of a sequence (or portion thereof) described in, for example Tables 1 A or 2 by procedures hereinafter further described, and others apparent to those skilled in the art.

[0071] Also provided in Table 7 is the name of the vector which contains the cDNA clone. Each vector is routinely used in the art. The following additional information is provided for convenience.

[0072] Vectors Lambda Zap (U.S. Pat. Nos. 5,128,256 and 5,286,636), Uni-Zap XR (U.S. Pat. Nos. 5,128,256 and 5,286,636), Zap Express (U.S. Pat. Nos. 5,128,256 and 5,286,636), pBluescript (pBS) (Short, J. M. et al., Nucleic Acids Res. 16:7583-7600 (1988); Alting-Mees, M. A. and Short, J. M., Nucleic Acids Res. 17:9494 (1989)) and pBK (Alting-Mees, M. A. et al., Strategies 5:58-61 (1992)) are commercially available from Stratagene Cloning Systems, Inc., 11011 N. Torrey Pines Road, La Jolla, Calif., 92037. pBS contains an ampicillin resistance gene and pBK contains a neomycin resistance gene. Phagemid pBS may be excised from the Lambda Zap and Uni-Zap XR vectors, and phagemid pBK may be excised from the Zap Express vector. Both phagemids may be transformed into E. coli strain XL-1 Blue, also available from Stratagene.

[0073] Vectors pSport1, pCMVSport 1.0, pCMVSport 2.0 and pCMVSport 3.0, were obtained from Life Technologies, Inc., P. O. Box 6009, Gaithersburg, Md. 20897. All Sport vectors contain an ampicillin resistance gene and may be transformed into E. coli strain DH10B, also available from Life Technologies. See, for instance, Gruber, C. E., et al., Focus 15:59-(1993). Vector lafmid BA (Bento Soares, Columbia University, New York, N.Y.) contains an ampicillin resistance gene and can be transformed into E. coli strain XL-1 Blue. Vector pCR®2.1, which is available from Invitrogen, 1600 Faraday Avenue, Carlsbad, Calif. 92008, contains an ampicillin resistance gene and may be transformed into E. Coli strain DH10B, available from Life Technologies. See, for instance, Clark, J. M., Nuc. Acids Res. 16:9677-9686 (1988) and Mead, D. et al., Bio/Technology 9: (1991).

[0074] The present invention also relates to the genes corresponding to SEQ ID NO:X, SEQ ID NO:Y, and/or the deposited clone (Clone ID NO:Z). The corresponding gene can be isolated in accordance with known methods using the sequence information disclosed herein. Such methods include preparing probes or primers from the disclosed sequence and identifying or amplifying the corresponding gene from appropriate sources of genomic material.

[0075] Also provided in the present invention are allelic variants, orthologs, and/or species homologs. Procedures known in the art can be used to obtain full-length genes, allelic variants, splice variants, full-length coding portions, orthologs, and/or species homologs of ovarian and/or breast associated genes corresponding to SEQ ID NO:X or the complement thereof, polypeptides encoded by SEQ ID NO:X or the complement thereof, and/or the cDNA contained in Clone ID NO:Z, using information from the sequences disclosed herein or the clones deposited with the ATCC. For example, allelic variants and/or species homologs may be isolated and identified by making suitable probes or primers from the sequences provided herein and screening a suitable nucleic acid source for allelic variants and/or the desired homologue.

[0076] The polypeptides of the invention can be prepared in any suitable manner. Such polypeptides include isolated naturally occurring polypeptides, recombinantly produced polypeptides, synthetically produced polypeptides, or polypeptides produced by a combination of these methods. Means for preparing such polypeptides are well understood in the art.

[0077] The polypeptides may be in the form of the secreted protein, including the mature form, or may be a part of a larger protein, such as a fusion protein (see below). It is often advantageous to include an additional amino acid sequence which contains secretory or leader sequences, pro-sequences, sequences which aid in purification, such as multiple histidine residues, or an additional sequence for stability during recombinant production.

[0078] The polypeptides of the present invention are preferably provided in an isolated form, and preferably are substantially purified. A recombinantly produced version of a polypeptide, including the secreted polypeptide, can be substantially purified using techniques described herein or otherwise known in the art, such as, for example, by the one-step method described in Smith and Johnson, Gene 67:31-40 (1988). Polypeptides of the invention also can be purified from natural, synthetic or recombinant sources using techniques described herein or otherwise known in the art, such as, for example, antibodies of the invention raised against the ovarian and/or breast polypeptides of the present invention in methods which are well known in the art.

[0079] The present invention provides a polynucleotide comprising, or alternatively consisting of, the nucleic acid sequence of SEQ ID NO:X, and/or the cDNA sequence contained in Clone ID NO:Z. The present invention also provides a polypeptide comprising, or alternatively, consisting of, the polypeptide sequence of SEQ ID NO:Y, a polypeptide encoded by SEQ ID NO:X or a complement thereof, a polypeptide encoded by the cDNA contained in Clone ID NO:Z, and/or the polypeptide sequence encoded by a nucleotide sequence in SEQ ID NO:B as defined in column 6 of Table 1B. Polynucleotides encoding a polypeptide comprising, or alternatively consisting of the polypeptide sequence of SEQ ID NO:Y, a polypeptide encoded by SEQ ID NO:X, a polypeptide encoded by the cDNA contained in Clone ID NO:Z and/or a polypeptide sequence encoded by a nucleotide sequence in SEQ ID NO:B as defined in column 6 of Table 1B are also encompassed by the invention. The present invention further encompasses a polynucleotide comprising, or alternatively consisting of, the complement of the nucleic acid sequence of SEQ ID NO:X, a nucleic acid sequence encoding a polypeptide encoded by the complement of the nucleic acid sequence of SEQ ID NO:X, and/or the cDNA contained in Clone ID NO:Z.

[0080] Moreover, representative examples of polynucleotides of the invention comprise, or alternatively consist of, one, two, three, four, five, six, seven, eight, nine, ten, or more of the sequences delineated in Table 1B column 6, or any combination thereof. Additional, representative examples of polynucleotides of the invention comprise, or alternatively consist of, one, two, three, four, five, six, seven, eight, nine, ten, or more of the complementary strand(s) of the sequences delineated in Table 1B column 6, or any combination thereof. In further embodiments, the above-described polynucleotides of the invention comprise, or alternatively consist of, sequences delineated in Table 1B, column 6, and have a nucleic acid sequence which is different from that of the BAC fragment having the sequence disclosed in SEQ ID NO:B (see Table 1B, column 5). In additional embodiments, the above-described polynucleotides of the invention comprise, or alternatively consist of, sequences delineated in Table 1B, column 6, and have a nucleic acid sequence which is different from that published for the BAC clone identified as BAC ID NO:A (see Table 1B, column 4). In additional embodiments, the above-described polynucleotides of the invention comprise, or alternatively consist of, sequences delineated in Table 1B, column 6, and have a nucleic acid sequence which is different from that contained in the BAC clone identified as BAC ID NO:A (see Table 1B, column 4). Polypeptides encoded by these polynucleotides, other polynucleotides that encode these polypeptides, and antibodies that bind these polypeptides are also encompassed by the invention. Additionally, fragments and variants of the above-described polynucleotides and polypeptides are also encompassed by the invention.

[0081] Further, representative examples of polynucleotides of the invention comprise, or alternatively consist of, one, two, three, four, five, six, seven, eight, nine, ten, or more of the sequences delineated in column 6 of Table 1B which correspond to the same Clone ID NO:Z (see Table 1B, column 1), or any combination thereof. Additional, representative examples of polynucleotides of the invention comprise, or alternatively consist of, one, two, three, four, five, six, seven, eight, nine, ten, or more of the complementary strand(s) of the sequences delineated in column 6 of Table 1B which correspond to the same Clone ID NO:Z (see Table 1B, column 1), or any combination thereof. In further embodiments, the above-described polynucleotides of the invention comprise, or alternatively consist of, sequences delineated in column 6 of Table 1B which correspond to the same Clone ID NO:Z (see Table 1B, column 1) and have a nucleic acid sequence which is different from that of the BAC fragment having the sequence disclosed in SEQ ID NO:B (see Table 1B, column 5). In additional embodiments, the above-described polynucleotides of the invention comprise, or alternatively consist of, sequences delineated in column 6 of Table 1B which correspond to the same Clone ID NO:Z (see Table 1B, column 1) and have a nucleic acid sequence which is different from that published for the BAC clone identified as BAC ID NO:A (see Table 1B, column 4). In additional embodiments, the above-described polynucleotides of the invention comprise, or alternatively consist of, sequences delineated in column 6 of Table 1B which correspond to the same Clone ID NO:Z (see Table 1B, column 1) and have a nucleic acid sequence which is different from that contained in the BAC clone identified as BAC ID NO:A (see Table 1B, column 4). Polypeptides encoded by these polynucleotides, other polynucleotides that encode these polypeptides, and antibodies that bind these polypeptides are also encompassed by the invention. Additionally, fragments and variants of the above-described polynucleotides and polypeptides are also encompassed by the invention.

[0082] Further, representative examples of polynucleotides of the invention comprise, or alternatively consist of, one, two, three, four, five, six, seven, eight, nine, ten, or more of the sequences delineated in column 6 of Table 1B which correspond to the same contig sequence identifer SEQ ID NO:X (see Table 1B, column 2), or any combination thereof. Additional, representative examples of polynucleotides of the invention comprise, or alternatively consist of, one, two, three, four, five, six, seven, eight, nine, ten, or more of the complementary strand(s) of the sequences delineated in column 6 of Table 1B which correspond to the same contig sequence identifer SEQ ID NO:X (see Table 1B, column 2), or any combination thereof. In further embodiments, the above-described polynucleotides of the invention comprise, or alternatively consist of, sequences delineated in column 6 of Table 1B which correspond to the same contig sequence identifer SEQ ID NO:X (see Table 1B, column 2) and have a nucleic acid sequence which is different from that of the BAC fragment having the sequence disclosed in SEQ ID NO:B (see Table 1B, column 5). In additional embodiments, the above-described polynucleotides of the invention comprise, or alternatively consist of, sequences delineated in column 6 of Table 1B which correspond to the same contig sequence identifer SEQ ID NO:X (see Table 1B, column 2) and have a nucleic acid sequence which is different from that published for the BAC clone identified as BAC ID NO:A (see Table 1B, column 4). In additional embodiments, the above-described polynucleotides of the invention comprise, or alternatively consist of, sequences delineated in column 6 of Table 1B which correspond to the same contig sequence identifer SEQ ID NO:X (see Table 1B, column 2) and have a nucleic acid sequence which is different from that contained in the BAC clone identified as BAC ID NO:A (See Table 1B, column 4). Polypeptides encoded by these polynucleotides, other polynucleotides that encode these polypeptides, and antibodies that bind these polypeptides are also encompassed by the invention. Additionally, fragments and variants of the above-described polynucleotides and polypeptides are also encompassed by the invention.

[0083] Moreover, representative examples of polynucleotides of the invention comprise, or alternatively consist of, one, two, three, four, five, six, seven, eight, nine, ten, or more of the sequences delineated in the same row of Table 1B column 6, or any combination thereof. Additional, representative examples of polynucleotides of the invention comprise, or alternatively consist of, one, two, three, four, five, six, seven, eight, nine, ten, or more of the complementary strand(s) of the sequences delineated in the same row of Table 1B column 6, or any combination thereof. In preferred embodiments, the polynucleotides of the invention comprise, or alternatively consist of, one, two, three, four, five, six, seven, eight, nine, ten, or more of the complementary strand(s) of the sequences delineated in the same row of Table 1B column 6, wherein sequentially delineated sequences in the table (i.e. corresponding to those exons located closest to each other) are directly contiguous in a 5′ to 3′ orientation. In further embodiments, above-described polynucleotides of the invention comprise, or alternatively consist of, sequences delineated in the same row of Table 1B, column 6, and have a nucleic acid sequence which is different from that of the BAC fragment having the sequence disclosed in SEQ ID NO:B (see Table 1B, column 5). In additional embodiments, the above-described polynucleotides of the invention comprise, or alternatively consist of, sequences delineated in the same row of Table 1B, column 6, and have a nucleic acid sequence which is different from that published for the BAC clone identified as BAC ID NO:A (see Table 1B, column 4). In additional embodiments, the above-described polynucleotides of the invention comprise, or alternatively consist of, sequences delineated in the same row of Table 1B, column 6, and have a nucleic acid sequence which is different from that contained in the BAC clone identified as BAC ID NO:A (see Table 1B, column 4). Polypeptides encoded by these polynucleotides, other polynucleotides that encode these polypeptides, and antibodies that bind these polypeptides are also encompassed by the invention.

[0084] In additional specific embodiments, polynucleotides of the invention comprise, or alternatively consist of, one, two, three, four, five, six, seven, eight, nine, ten, or more of the sequences delineated in column 6 of Table 1B, and the polynucleotide sequence of SEQ ID NO:X (e.g., as defined in Table 1B, column 2) or fragments or variants thereof. Polypeptides encoded by these polynucleotides, other polynucleotides that encode these polypeptides, and antibodies that bind these polypeptides are also encompassed by the invention.

[0085] In additional specific embodiments, polynucleotides of the invention comprise, or alternatively consist of, one, two, three, four, five, six, seven, eight, nine, ten, or more of the sequences delineated in column 6 of Table 1B which correspond to the same Clone ID NO:Z (see Table 1B, column 1), and the polynucleotide sequence of SEQ ID NO:X (e.g., as defined in Table 1A or 1B) or fragments or variants thereof. In preferred embodiments, the delineated sequence(s) and polynucleotide sequence of SEQ ID NO:X correspond to the same Clone ID NO:Z. Polypeptides encoded by these polynucleotides, other polynucleotides that encode these polypeptides, and antibodies that bind these polypeptides are also encompassed by the invention.

[0086] In further specific embodiments, polynucleotides of the invention comprise, or alternatively consist of, one, two, three, four, five, six, seven, eight, nine, ten, or more of the sequences delineated in the same row of column 6 of Table 1B, and the polynucleotide sequence of SEQ ID NO:X (e.g., as defined in Table 1A or 1B) or fragments or variants thereof. In preferred embodiments, the delineated sequence(s) and polynucleotide sequence of SEQ ID NO:X correspond to the same row of column 6 of Table 1B. Polypeptides encoded by these polynucleotides, other polynucleotides that encode these polypeptides, and antibodies that bind these polypeptides are also encompassed by the invention.

[0087] In additional specific embodiments, polynucleotides of the invention comprise, or alternatively consist of a polynucleotide sequence in which the 3′ 10 polynucleotides of one of the sequences delineated in column 6 of Table 1B and the 5′ 10 polynucleotides of the sequence of SEQ ID NO:X are directly contiguous. Nucleic acids which hybridize to the complement of these 20 contiguous polynucleotides under stringent hybridization conditions or alternatively, under lower stringency conditions, are also encompassed by the invention. Polypeptides encoded by these polynucleotides and/or nucleic acids, other polynucleotides and/or nucleic acids that encode these polypeptides, and antibodies that bind these polypeptides are also encompassed by the invention. Additionally, fragments and variants of the above-described polynucleotides, nucleic acids, and polypeptides are also encompassed by the invention.

[0088] In additional specific embodiments, polynucleotides of the invention comprise, or alternatively consist of, a polynucleotide sequence in which the 3′ 10 polynucleotides of one of the sequences delineated in column 6 of Table 1B and the 5′ 10 polynucleotides of a fragment or variant of the sequence of SEQ ID NO:X are directly contiguous Nucleic acids which hybridize to the complement of these 20 contiguous polynucleotides under stringent hybridization conditions or alternatively, under lower stringency conditions, are also encompassed by the invention. Polypeptides encoded by these polynucleotides and/or nucleic acids, other polynucleotides and/or nucleic acids encoding these polypeptides, and antibodies that bind these polypeptides are also encompassed by the invention. Additionally, fragments and variants of the above-described polynucleotides, nucleic acids, and polypeptides are also encompassed by the invention.

[0089] In specific embodiments, polynucleotides of the invention comprise, or alternatively consist of, a polynucleotide sequence in which the 3′ 10 polynucleotides of the sequence of SEQ ID NO:X and the 5′ 10 polynucleotides of the sequence of one of the sequences delineated in column 6 of Table 1B are directly contiguous. Nucleic acids which hybridize to the complement of these 20 contiguous polynucleotides under stringent hybridization conditions or alternatively, under lower stringency conditions, are also encompassed by the invention. Polypeptides encoded by these polynucleotides and/or nucleic acids, other polynucleotides and/or nucleic acids encoding these polypeptides, and antibodies that bind these polypeptides are also encompassed by the invention. Additionally, fragments and variants of the above-described polynucleotides, nucleic acids, and polypeptides are also encompassed by the invention.

[0090] In specific embodiments, polynucleotides of the invention comprise, or alternatively consist of, a polynucleotide sequence in which the 3′ 10 polynucleotides of a fragment or variant of the sequence of SEQ ID NO:X and the 5′ 10 polynucleotides of the sequence of one of the sequences delineated in column 6 of Table 1B are directly contiguous. Nucleic acids which hybridize to the complement of these 20 contiguous polynucleotides under stringent hybridization conditions or alternatively, under lower stringency conditions, are also encompassed by the invention. Polypeptides encoded by these polynucleotides and/or nucleic acids, other polynucleotides and/or nucleic acids encoding these polypeptides, and antibodies that bind these polypeptides are also encompassed by the invention. Additionally, fragments and variants of the above-described polynucleotides, nucleic acids, and polypeptides, are also encompassed by the invention.

[0091] In further specific embodiments, polynucleotides of the invention comprise, or alternatively consist of, a polynucleotide sequence in which the 3′ 10 polynucleotides of one of the sequences delineated in column 6 of Table 1B and the 5′ 10 polynucleotides of another sequence in column 6 are directly contiguous. Nucleic acids which hybridize to the complement of these 20 contiguous polynucleotides under stringent hybridization conditions or alternatively, under lower stringency conditions, are also encompassed by the invention. Polypeptides encoded by these polynucleotides and/or nucleic acids, other polynucleotides and/or nucleic acids encoding these polypeptides, and antibodies that bind these polypeptides are also encompassed by the invention. Additionally, fragments and variants of the above-described polynucleotides, nucleic acids, and polypeptides are also encompassed by the invention.

[0092] In specific embodiments, polynucleotides of the invention comprise, or alternatively consist of, a polynucleotide sequence in which the 3′ 10 polynucleotides of one of the sequences delineated in column 6 of Table 1B and the 5′ 10 polynucleotides of another sequence in column 6 corresponding to the same Clone ID NO:Z (see Table 1B, column 1) are directly contiguous. Nucleic acids which hybridize to the complement of these 20 lower stringency conditions, are also encompassed by the invention. Polypeptides encoded by these polynucleotides and/or nucleic acids, other polynucleotides and/or nucleic acids encoding these polypeptides, and antibodies that bind these polypeptides are also encompassed by the invention. Additionally, fragments and variants of the above-described polynucleotides, nucleic acids, and polypeptides are also encompassed by the invention.

[0093] In specific embodiments, polynucleotides of the invention comprise, or alternatively consist of, a polynucleotide sequence in which the 3′ 10 polynucleotides of one sequence in column 6 corresponding to the same contig sequence identifer SEQ ID NO:X (see Table 1B, column 2) are directly contiguous. Nucleic acids which hybridize to the complement of these 20 contiguous polynucleotides under stringent hybridization conditions or alternatively, under lower stringency conditions, are also encompassed by the invention. Polypeptides encoded by these polynucleotides and/or nucleic acids, other polynucleotides and/or nucleic acids encoding these polypeptides, and antibodies that bind these polypeptides are also encompassed by the invention. Additionally, fragments and variants of the above-described polynucleotides, nucleic acids, and polypeptides are also encompassed by the invention.

[0094] In specific embodiments, polynucleotides of the invention comprise, or alternatively consist of a polynucleotide sequence in which the 3′ 10 polynucleotides of one of the sequences delineated in column 6 of Table 1B and the 5′ 10 polynucleotides of another sequence in column 6 corresponding to the same row are directly contiguous. In preferred embodiments, the 3′ 10 polynucleotides of one of the sequences delineated in column 6 of Table 1B is directly contiguous with the 5′ 10 polynucleotides of the next sequential exon delineated in Table 1B, column 6. Nucleic acids which hybridize to the complement of these 20 contiguous polynucleotides under stringent hybridization conditions or alternatively, under lower stringency conditions, are also encompassed by the invention. Polypeptides encoded by these polynucleotides and/or nucleic acids, other polynucleotides and/or nucleic acids encoding these polypeptides, and antibodies that bind these polypeptides are also encompassed by the invention. Additionally, fragments and variants of the above-described polynucleotides, nucleic acids, and polypeptides are also encompassed by the invention.

[0095] Many polynucleotide sequences, such as EST sequences, are publicly available and accessible through sequence databases and may have been publicly available prior to conception of the present invention. Preferably, such related polynucleotides are specifically excluded from the scope of the present invention. Accordingly, for each contig sequence (SEQ ID NO:X) listed in the third column of Table 1A, preferably excluded are one or more polynucleotides comprising a nucleotide sequence described by the general formula of a-b, where a is any integer between 1 and the final nucleotide minus 15 of SEQ ID NO:X, b is an integer of 15 to the final nucleotide of SEQ ID NO:X, where both a and b correspond to the positions of nucleotide residues shown in SEQ ID NO:X, and where b is greater than or equal to a +14. More specifically, preferably excluded are one or more polynucleotides comprising a nucleotide sequence described by the general formula of a-b, where a and b are integers as defined in columns 4 and 5, respectively, of Table 3. In specific embodiments, the polynucleotides of the invention do not consist of at least one, two, three, four, five, ten, or more of the specific polynucleotide sequences referenced by the Genbank Accession No. as disclosed in column 6 of Table 3 (including for example, published sequence in connection with a particular BAC clone). In further embodiments, preferably excluded from the invention are the specific polynucleotide sequence(s) contained in the clones corresponding to at least one, two, three, four, five, ten, or more of the available material having the accession numbers identified in the sixth column of this Table (including for example, the actual sequence contained in an identified BAC clone). In no way is this listing meant to encompass all of the sequences which may be excluded by the general formula, it is just a representative example. All references available through these accessions are hereby incorporated by reference in their entirety.

TABLE 3

| Clone ID | SEQ ID | Contig | EST Disclaimer | | |
|---|---|---|---|---|---|
| NO: Z | NO: X | ID: | Range of a | Range of b | Accession #'s |
| HBNAI71 | 11 | 655514 | 1-321 | 15-335 | |
| HBNAN41 | 12 | 655842 | 1-299 | 15-313 | |
| HBNAW92 | 13 | 524954 | 1-274 | 15-288 | AF107885. |
| HBNAX71 | 14 | 530843 | 1-73 | 15-87 | |
| HBNAY58 | 15 | 558193 | 1-492 | 15-506 | T47565. |
| HBNBT52 | 16 | 524869 | 1-366 | 15-380 | |
| HMVDU41 | 17 | 957804 | 1-600 | 15-614 | AW195334. |
| HNBTT79 | 18 | 965424 | 1-228 | 15-242 | |
| HNBTX52 | 19 | 965428 | 1-327 | 15-341 | F35097, F24745, AW071109, AA528500, AA460268, H48768, |
| | | | | | AA715075, AA593273, AA715173, AI820526, H73306, AA648957, |
| | | | | | AA836548, AW439703, AA846482, T47889, AA708194, AA772704, |
| | | | | | AA302690, AA890060, T54173, N36143, AA058312, H58883, |
| | | | | | AL117352, AC007011, Z97056, AC002425, AC003982, AL022336, |
| | | | | | AC002492, AC002070, AC004125, AC005753, AC004963, AL035461, |
| | | | | | AC005520, Z95152, AL031984, Z95115, Z85996, AL035681, |
| | | | | | AL035455, AL031284, AC005243, AC007707, AC005233, AC002310, |
| | | | | | AL035088, AF165926, AL117337, AL034549, AL132712, AC005666, |
| | | | | | AC002563, AL033538, AC002420, AF205588, Z96753, AL135783, |
| | | | | | AL031657, AL109628, AC002045, AL049576, AC000015, AL031283, |
| | | | | | AC004962, AC000026, Z93241, AC006449, AC002059, AC005225, |
| | | | | | AF129756, AC007057, Z82182, AL034429, L78810, U67809, |
| | | | | | AC004167, AC009044, AC006064, AC005962, AC006360, AL023807, |
| | | | | | Z86090, AC007201, AC007880, AC003666, AC007283, AC003070, |
| | | | | | AC002369, AC004851, AC005519, AC004638, AC006262, AC005081, |
| | | | | | AC007919, M89651, AC005971, AC004601, AC005940, AL021977, |
| | | | | | AC005730, AC002452, AC004923, AL050318, AC009509, AC005231, |
| | | | | | AL080243, AC002390, AC009288, AL031643, AC004832, AC004821, |
| | | | | | AC005722, AC003681, AL049776, AC002429, AP000552, AL031651, |
| | | | | | AC006958, Z83846, AC005684, AC005335, AC004882, AC005924, |
| | | | | | AP000135, Z82205, AC004554, AF196969, AC012085, AC004703, |
| | | | | | AC011718, AC005102, AC005191, AD001527, and AC007052. |
| HNBUM19 | 20 | 933672 | 1-469 | 15-483 | AI460390, AI141130, AA364420, AA557913, AI185394, AI267884, |
| | | | | | AI251429, AA639114, AA687542, AL042771, AW264901, AA603264, |
| | | | | | AI821805, AI821056, AI792092, AA278496, AI446205, AW270768, |
| | | | | | H72278, AW008074, AI291037, AW277174, N27751, AI436378, |
| | | | | | H63154, AC005180, AC004895, AL049795, AC002091, AC005562, |
| | | | | | AC009516, AC005015, AC008044, AF030453, AC007565, AC003663, |
| | | | | | AL096791, AL049780, AC004985, AC005914, AC003101, AL049776, |
| | | | | | AL080243, AC006312, AC005081, AF053356, AC007676, AC005229, |
| | | | | | AC005755, AP000558, AC006571, AL022313, AL031427, AC007686, |
| | | | | | AC005088, AL133163, AC002477, AB023049, AC005003, AP000552, |
| | | | | | Z83826, AL079304, AC004386, AC006088, AC006530, Z97054, |
| | | | | | Z93023, AC004890, AC000353, AC007226, AC005971, AP000704, |
| | | | | | AL049757, AC002301, U91323, AC008372, AC003982, Z83840, |
| | | | | | AF207550, AL109628, AC005829, AC002350, AL008582, AL135744, |
| | | | | | AL139054, AC006039, AC004491, AF050154, AC004033, AJ003147, |
| | | | | | AC005500, AP000557, AL049653, AC002310, AL031680, AC004967, |
| | | | | | AP000556, AC004019, AC006509, AL049766, AL031311, AC005086, |
| | | | | | AC006285, AC004662, AC007540, AP000501, AC005037, AC004878, |
| | | | | | AL024498, AL035079, Z85986, AC005225, AL031587, Z98200, |
| | | | | | AC004821, Z97056, Y14768, AC006511, AC004841, AF024534, |
| | | | | | AC008040, AC007283, AC006101, AF047825, AC005921, AL096701, |
| | | | | | AC007546, Z95331, AC007229, AC004144, AL023553, AC002418, |
| | | | | | AC005412, AP000505, AC005519, AC007216, AC005071, AC005261, |
| | | | | | AL034451, AC005332, AC007151, AC002365, AL035072, AL031255, |
| | | | | | AC005839, AC006468, AP000512, AC006064, AC005484, AL008718, |
| | | | | | AF111167, AC006111, AC004876, U80017, AL034429, AC005666, |
| | | | | | AC004526, AF111168, AC006277, AL031659, AP000008, AC002492, |
| | | | | | AP000692, AC007055, AP000555, AF165926, AC005488, AC006211, |
| | | | | | AC005746, AL022163, AF196969, AC005295, AF067844, AL022302, |
| | | | | | AC002115, U29895, AC002996, AF129756, AC005031, AF134726, |
| | | | | | AP001052, AL023575, AC005940, AL022721, AL022318, AL031005, |
| | | | | | AC004477, AC005695, AC004854, AC005944, AL049692, AP000553, |
| | | | | | AC002375, Z82203, Z98742, AC004832, AC005841, AF196779, |
| | | | | | AL031589, AC007993, AC005300, AC005696, AL078581, AC005049, |
| | | | | | U82828, Z82976, AC006160, AC005529, AC006251, and AC002126. |
| HNBUR07 | 21 | 951814 | 1-442 | 15-456 | AA759267. |
| HNOAX12 | 22 | 969363 | 1-777 | 15-791 | N59866, N22173, H24646, H27385, AL119324, AL119457, AL042544, |
| | | | | | AL119399, AL119464, AW392670, AL119443, U46349, AL119418, |
| | | | | | AL134902, Z99396, AL119444, U46351, AL119391, AL119363, |
| | | | | | AL042965, AL119319, AL119355, AL119483, AW372827, AW363220, |
| | | | | | U46350, U46347, AW384394, AL119439, AL119484, AL119497, |
| | | | | | AL119401, AL134538, AL119341, U46346, AL134536, U46341, |
| | | | | | AL134525, AL119335, AL037205, U46345, AL043019, AL042450, |
| | | | | | AL042984, AL042542, AL042614, AL042975, AL043029, AL119304, |
| | | | | | AL043003, AL042551, AP000473, AR066494, AR060234, AR054110, |
| | | | | | A81671, and AB026436. |
| HNOCQ04 | 23 | 964933 | 1-686 | 15-700 | AI717999, AW404782, AI831040, C15687, AW410719, AI634938, |
| | | | | | AI479751, AA723194, AA398997, AA455667, AW410718, AI589849, |
| | | | | | AA584383, AI130687, AI190201, AI525790, AI460181, W69759, |
| | | | | | AA456685, AA632185, AA456287, AI298115, R53507, AA644652, |
| | | | | | D45471, AI368832, AW300844, AI762742, AA976082, AA621626, |
| | | | | | AI912458, AA781178, AA292406, AA643693, AI814720, AA399628, |
| | | | | | AI351664, AA989507, AW408212, AA132709, F20423, AA292771, |
| | | | | | AA765663, AA417936, AA026022, AI282190, AA394242, AA586966, |
| | | | | | AI351631, AA620713, AA582000, AI708099, R55785, AI039470, |
| | | | | | AI498903, AA132838, AW406442, AA327225, AA777017, AA564894, |
| | | | | | AA635420, AI832846, AI203528, AI274498, AA774256, N71139, |
| | | | | | AA328719, AA418114, AA810589, AA303814, AI832934, T54206, |
| | | | | | AA084447, AA093329, AA720518, AA552845, D81168, AA304523, |
| | | | | | AA582959, AA298391, AA838663, AA765473, AA411181, AA187606, |
| | | | | | AW404897, AA411255, AI814800, AA025235, H80024, AW375226, |
| | | | | | AA651654, W01588, AW008079, AA405649, AI283769, AA384979, |
| | | | | | F25444, AI916435, AA776514, AW407879, AA308415, AA318663, |
| | | | | | AA081629, AW175606, AI569238, AI245051, AA758698, AI268159, |
| | | | | | AA707891, AI695095, T65944, AA394168, AA405650, R55866, |
| | | | | | W69865, T48798, D44876, and AF061177. |
| HNOCT39 | 24 | 952611 | 1-101 | 15-115 | AA806386, AI244963, AW069189, AA811454, AW069641, AA228016, |
| | | | | | AI926450, N20102, AA984503, AI283001, AI335808, AI022959, |
| | | | | | AI699076, AW008997, AI092767, AI358493, AI289652, AI309309, |
| | | | | | AA747446, AA521303, AI460092, AI354930, AW105294, AA902193, |
| | | | | | AI358182, AA975250, AA576719, AI766428, AI335889, AA071293, |
| | | | | | T10067, R58045, and AI355753. |
| HNOCU05 | 25 | 957833 | 1-733 | 15-747 | AW364014, AW364012, AW364015, AW364019, AI760785, AI267509, |
| | | | | | AI224905, R80458, N76465, AI384093, N59362, AA513728, |
| | | | | | AA729606, R80659, AI351352, AI499874, D61921, R69849, |
| | | | | | AA573139, R31977, and AB033047. |
| HODER91 | 26 | 789661 | 1-338 | 15-352 | AA233995, and AB033047. |
| HOVAF17 | 27 | 576627 | 1-344 | 15-358 | |
| HOVAF71 | 28 | 757294 | 1-370 | 15-384 | |
| HOVAG49 | 29 | 927320 | 1-479 | 15-493 | AA143074, AA987383, W60511, AA680304, AA827641, AA308290, |
| | | | | | AA401334, F25999, AA313726, F22587, AI358423, AA315506, |
| | | | | | AI141189, W58769, AA575866, AA515848, F19218, F19304, |
| | | | | | AA156103, F37437, F33656, N98867, F25212, AA740468, AA157759, |
| | | | | | AA728989, F24956, AA608827, F36060, AA737291, AA194358, |
| | | | | | AA932208, AI143027, F24362, F31772, F27422, F32057, T57362, |
| | | | | | AA192185, F24856, AA995725, AA741404, AA314904, F34156, |
| | | | | | AA889507, AW022412, N55638, F20992, AA526390, W90626, |
| | | | | | AA007592, F21312, AA954254, AI749361, AA148433, AA579682, |
| | | | | | F29723, T57445, AI291661, AI282169, F29662, AA491525, AA747585, |
| | | | | | F22463, F29957, F31884, AI536594, AA664969, F31246, F33617, |
| | | | | | AA730678, AA385186, F35367, F20491, F29466, F37060, F24202, |
| | | | | | AA705812, AA492193, AA382505, W88582, AA314719, F34612, |
| | | | | | W04663, AA157650, F30675, F23580, F27384, F31800, F27612, |
| | | | | | AI933136, AA974467, F35170, AI826775, AA528421, F29578, F23463, |
| | | | | | AA767198, F34150, F24124, AA384045, AA492088, F27860, N56464, |
| | | | | | F31547, F34856, AA594575, AI276978, F33998, AA316521, AI133697, |
| | | | | | F28088, F29835, F37748, AI384039, AI810403, W81175, AI867973, |
| | | | | | T74339, AI701341, AA639064, AA976781, AW241684, AA247353, |
| | | | | | AA007389, F23553, N89217, F27386, T23491, Z40911, T16443, |
| | | | | | W90249, and AB017710. |
| HOVAI41 | 30 | 670963 | 1-93 | 15-107 | |
| HOVAM50 | 31 | 723671 | 1-350 | 15-364 | |
| HOVBY34 | 32 | 706816 | 1-404 | 15-418 | AA846482, AA728911, AL043212, AI653783, T47138, AA832016, |
| | | | | | AA831801, AI185394, F31951, T52772, AW079737, AW271085, |
| | | | | | AA714073, AA552724, AA810154, AA018923, AA012829, AA633565, |
| | | | | | AI061619, AI306717, AW419389, H91047, AI800343, AI342786, |
| | | | | | AI300413, AA356376, AA846923, AA496309, AI915081, AA745628, |
| | | | | | AA298569, H43183, AI417586, AA640252, AW019964, H62550, |
| | | | | | AI873627, T40629, AA053463, AI300818, AI310992, AW302670, |
| | | | | | AI270120, AA230146, AA805848, AI671077, AW084173, AA568856, |
| | | | | | AL134332, AA626632, AI583291, AA366601, T62078, AI904944, |
| | | | | | AI133418, AA862029, AA513884, AI889579, AW002330, AI479148, |
| | | | | | AA568314, AA768179, AI278847, AI627868, AA297789, AI434037, |
| | | | | | AI251809, R84528, AW272640, AI130709, M78021, AI536858, |
| | | | | | AI537995, AW073598, AW089016, AI287766, AA434078, AA745543, |
| | | | | | AL039761, AI281818, F31811, AI445373, AA742775, AI619994, |
| | | | | | AA811954, N69399, AI302277, AA167179, AA678616, AW341955, |
| | | | | | AI814682, AW243945, AI291439, AA715605, AL134418, AA728874, |
| | | | | | H73306, AL037632, AL041375, H84412, H43771, AW078821, |
| | | | | | AI431513, R70883, AA904211, AA173166, AI678476, AA856866, |
| | | | | | AA469282, R87912, AW169118, AA633039, AW390284, AW117723, |
| | | | | | AA569597, AI347665, H67172, AI865776, AA244181, AA714921, |
| | | | | | AI955029, AW190277, R87883, AI472736, AI591134, H42893, N91138, |
| | | | | | AW079667, AW089950, AA599532, R70884, AW272815, AA644223, |
| | | | | | AW148775, N73060, AA371410, AA420729, AW440568, AI343669, |
| | | | | | AI064781, AI309121, AA581498, AI583466, AW274191, AI306232, |
| | | | | | AI251576, AI733856, AI612810, AI817108, AA678932, AI811647, |
| | | | | | AW002831, AW081610, AA483606, AA019003, AI816058, AA515351, |
| | | | | | AI628859, AA229988, AA363003, H86221, T74524, AA937809, |
| | | | | | AA515924, H29914, AL039309, AA630845, AI889995, AI859744, |
| | | | | | AW117704, AA302661, AI370170, AC006487, AP000555, AC006312, |
| | | | | | U18271, AC005231, AC005037, U73330, AC002467, AC004491, |
| | | | | | AC005288, AC004843, AL008629, AC007686, AC007298, AC004878, |
| | | | | | AL031120, AC007269, AF027390, AC007055, AF039906, AP000300, |
| | | | | | AP000113, AP000045, AC005740, AC005529, AC003101, AC004526, |
| | | | | | AF112482, Z79996, AC003086, AL096761, AC002544, AJ246003, |
| | | | | | AP000884, AC009247, AC004651, AC004760, AF176815, AC005005, |
| | | | | | AC006111, AL121658, AC005003, AC008078, AC004991, AL024508, |
| | | | | | AC005553, AB023050, AP000212, AP000134, AC005089, AC006061, |
| | | | | | AC004601, AC005684, AC006101, AP000350, AL121754, AC008064, |
| | | | | | AL096775, AC005532, AC004883, AL096791, AC007514, Z98304, |
| | | | | | AL031575, U95739, Z83845, AL031005, AL031433, AC002117, |
| | | | | | U51244, AL031585, AL049575, AL049550, AC008082, AC006449, |
| | | | | | AC003051, AC004084, AL049610, AC007225, U491319, U91320, |
| | | | | | AC008545, AC002549, AL031584, AC007344, AL022318, AC008040, |
| | | | | | AC005940, AF115566, AL109758, U95742, AL117351, AL034423, |
| | | | | | AF111169, AC006392, AC002543, Z81365, AC005081, AC007277, |
| | | | | | AC004692, AL049776, AC005015, M87889, AC000090, AP000252, |
| | | | | | AC005031, AP000030, U80017, AL022396, AC004655, AC006360, |
| | | | | | AC004025, AC007666, AC004686, U02047, AP000122, AP000054, |
| | | | | | AL121825, AP000289, AC005480, AP000042, AP000110, AL008730, |
| | | | | | AL031289, AC005011, AC007182, AL121652, Z98036, AB003151, |
| | | | | | Z95114, AC004687, AL096818, Z48051, AC002100, AP000067, |
| | | | | | AC006162, L47234, Z83733, AL035072, AL049749, AC003983, |
| | | | | | AC000159, AF196970, AL031429, AL031664, AP000355, AL023775, |
| | | | | | AL031737, AF001552, AC004896, AC005519, U94776, Z75407, |
| | | | | | AL109627, AL035422, AC007358, AC003108, AC005899, AF196779, |
| | | | | | AC000134, AL031431, AC006238, AC005602, AL049872, AC005409, |
| | | | | | Z85986, AL049764, AD000812, AC003072, AL049733, AL023575, |
| | | | | | AC002126, AL035681, Z93930, AC004540, AC006501, AC000111, |
| | | | | | AC006013, AL031228, AC004895, AC004776, AC005924, AL080250, |
| | | | | | AC004000, L78810, AC004231, AL031311, AL117337, AC007736, |
| | | | | | AC005722, AC005274, AF205588, AP000116, AP000049, AC005247, |
| | | | | | AL021878, Z99716, AC003690, AL022574, AC004073, AL008635, |
| | | | | | AC004535, AF196969, AL031295, AF207550, AL078603, AL033381, |
| | | | | | Z83820, AC007878, AC009509, AC005036, AF130343, AC005207, |
| | | | | | AP000311, AL035420, AC006388, AP000313, AL078471, AP000194, |
| | | | | | AP000050, AP000117, AC006141, AB001913, U73628, AC007216, |
| | | | | | AL031722, U07562, AC005593, AL022320, AC007242, AC004822, |
| | | | | | AC004812, AC002432, Z98884, AC006536, AB016897, AL031767, |
| | | | | | AL109827, AC002477, AC006473, AC002400, Z94801, I34294, |
| | | | | | AP000322, AC005625, AC006163, AC003959, AP000152, and |
| | | | | | AP000053. |
| HOVBZ26 | 33 | 888442 | 1-203 | 15-217 | |
| HOVCA52 | 34 | 727170 | 1-409 | 15-423 | |
| HOVCD39 | 35 | 705406 | 1-360 | 15-374 | AA535937, AC002314, AC005206, AC005667, AL049832, AC005668, |
| | | | | | AF111169, AL022316, AC007376, AF001549, AC006160, AC005412, |
| | | | | | AC007955, U78027, AC007041, AL035422, AC006285, AC005261, |
| | | | | | AC007227, AF134726, AL031311, X14448, AC005786, AC006257, and |
| | | | | | AL049830. |
| HOVCI76 | 36 | 858845 | 1-346 | 15-360 | AL049694. |
| HOVCI77 | 37 | 713792 | 1-263 | 15-277 | |
| HOVCJ24 | 38 | 858844 | 1-305 | 15-319 | |
| HOVCO11 | 39 | 970814 | 1-1454 | 15-1468 | AI923848, AI680189, AI401617, AI373875, AA455317, AA701656, |
| | | | | | AI472034, AI573004, AL120931, AA398429, AI051123, AI624093, |
| | | | | | AI248617, H99041, AI355692, AA687849, AI355703, AI359209, |
| | | | | | AA757226, AW131426, N33217, N91144, AI342620, N27564, |
| | | | | | AI298478, AI589126, AW193312, AI923367, AI890992, AI435647, |
| | | | | | AA788753, AA601557, AI682609, AI583218, AA678000, AW168929, |
| | | | | | AA614659, AI298694, AA036731, N66889, H97544, AA745905, |
| | | | | | D62527, H18598, N89744, AI245176, AA403052, AA150090, |
| | | | | | AI248821, AI287545, N22090, AI263846, AI245198, AA894619, |
| | | | | | AI185100, AI272966, R69930, AI075972, AI242237, AI435894, |
| | | | | | AI348194, AA479068, H46858, AI811692, N47754, AI784586, |
| | | | | | AW058621, AW081918, AW168028, AI346563, AI566456, AI186661, |
| | | | | | AI433476, AI770052, AI963008, AI187073, R69882, AA812522, |
| | | | | | AI888697, F36516, AI890986, AA514269, F11075, C02214, AW002830, |
| | | | | | AA381400, AA381382, AI143203, AI350680, AI375753, AA968981, |
| | | | | | AI432046, AI080704, AW169284, AI866206, AA150159, AA381630, |
| | | | | | AI566594, AA381701, AA381636, R76807, R20526, AA844237, |
| | | | | | AA381643, R27302, AA381945, AA904561, AI280761, R66707, |
| | | | | | AI382360, H04179, D61736, AI697429, AW378387, R67586, |
| | | | | | AA805532, AA381644, AI932870, N93493, AA381602, H18624, |
| | | | | | AA381460, AA381275, AA476343, AA654417, AW104101, N90151, |
| | | | | | AI805033, AA347509, R32649, R33334, F31071, AW051256, N56395, |
| | | | | | AA455704, AA744342, AA291227, AA089961, AA761970, N40385, |
| | | | | | W17019, R07700, N41931, AW021551, R66241, AA284149, |
| | | | | | AA381605, R52479, T75133, R75976, AW152083, AA167390, W81443, |
| | | | | | AA804381, AA366783, AW057830, AA482823, AF139791, AA427526, |
| | | | | | H27061, AA909840, AI802150, AW378359, AA808476, AI679723, |
| | | | | | AA765452, H39601, AA889282, H18597, AI679152, W04813, |
| | | | | | AI216644, AW378412, AA036938, T20149, AI915452, AA130568, |
| | | | | | R33333, AI570298, N34507, AI280767, AA632567, AA216333, and |
| | | | | | AC004520. |
| HOVCO58 | 40 | 736065 | 1-408 | 15-422 | |
| HOVCQ47 | 41 | 496190 | 1-628 | 15-642 | AA176289, AI341253, AI476272, AI631533, AA609460, AA503370, |
| | | | | | AI797388, AA421578, AA421007, and AA310749. |
| HOVDY04 | 42 | 926219 | 1-532 | 15-546 | AA725889, AI937507, AI090742, AI190613, AI363396, AA485978, |
| | | | | | AW137065, AI061260, AA029073, AW449608, AA488604, AA928760, |
| | | | | | AI560967, AA908207, AI499789, AI499666, AI638627, AI638193, |
| | | | | | AA670299, AI699081, AI695989, AI538115, AA700477, AA969203, |
| | | | | | AW207595, AW007189, AA693349, AA029072, AW453024, |
| | | | | | AL119457, AL119324, AL119418, AW392670, Z99396, AL119443, |
| | | | | | AL042544, AL119399, AW372827, AW384394, AL119319, AW363220, |
| | | | | | AL119497, AL134902, U46351, AL119484, AL119391, AL119522, |
| | | | | | AL119363, AL119355, AL119483, U46350, U46341, AL119341, |
| | | | | | AL119335, AL119396, U46349, AL119496, U46347, AL042965, |
| | | | | | AL037205, AL119464, AL119444, AL119401, AL119439, AL134525, |
| | | | | | AL134536, U46346, AL134538, AL134531, AL042614, AL042984, |
| | | | | | AL043019, AL042975, U46345, AL043029, AL042542, AL042551, |
| | | | | | AI142132, AL042450, AL043003, AR060234, AR066494, A81671, |
| | | | | | AB026436, AR054110, and AR069079. |
| HWLHJ68 | 43 | 957834 | 1-1601 | 15-1615 | AW364014, AW364012, AW364015, AW364019, AI760785, AI384093, |
| | | | | | AI224905, AA282933, AI267509, AA513728, AA729606, R80458, |
| | | | | | N76465, N59362, AA334630, AA300682, R69849, R80659, AA573139, |
| | | | | | H86676, AA427982, AI499874, R31977, AI351352, D61921, AI091339, |
| | | | | | AA310325, AI051323, AA830587, N67319, AA449856, AA621436, |
| | | | | | N93060, AW134482, AI694673, AI161320, AI623166, AI582177, |
| | | | | | AW241458, AA648966, AA724337, and AB033047. |
| HOVEV01 | 44 | 914553 | 1-721 | 15-735 | AI042120, AI520690, AI346542, R80717, N70361, H97746, AA678405, |
| | | | | | T48628, T95511, R50705, AI678296, R99146, AA973947, AW392739, |
| | | | | | AL046192, W05002, AW138135, R50704, AW371372, AI620712, |
| | | | | | AI350513, AI423566, AI342100, R80716, D79458, AA933894, T95510, |
| | | | | | AA622588, T48627, AW392719, AA781834, AA258040, AL040243, |
| | | | | | AI684279, AI537677, AW104724, AI624279, AI564719, AL119748, |
| | | | | | AI815232, D79367, AI567940, AI254731, AW132056, AI445025, |
| | | | | | AI648509, AI491852, AL045266, AI537024, AL049085, AI500706, |
| | | | | | AI922901, AI499463, AW262565, AI269862, AI275175, AI802542, |
| | | | | | AI677796, AI433976, AL045500, AI433157, AL043326, AI500523, |
| | | | | | AI539771, AL134830, AI619502, AI335449, AI500659, AI491776, |
| | | | | | AI648663, AI520785, AI536638, AI702068, AI801766, AI269205, |
| | | | | | AI811344, AW087445, AI637584, AI284484, AI559296, AI591316, |
| | | | | | AI554427, AI890833, AI926790, AW026882, AW148408, AW071349, |
| | | | | | AW301409, AI445237, AW151138, AL079977, AI610402, AW198090, |
| | | | | | AI921248, AI702073, AW004685, AI573032, AI446628, AW087207, |
| | | | | | AI682971, AW088793, AI868831, AI624206, AI702406, AI571909, |
| | | | | | AI475451, AW162071, AI287489, AW150578, AI654276, AI889376, |
| | | | | | AI620284, AI524671, AW129659, AL079963, AW169671, AI560099, |
| | | | | | AI468872, AL036361, AI440239, AI815855, AW090013, AI249257, |
| | | | | | AI590999, AI866608, AI568296, AI538716, AI432969, AI439745, |
| | | | | | AA225339, AI349004, AI872711, AI828731, AI569583, AI499393, |
| | | | | | AI871697, AI273048, AW268220, AI520862, AL047763, AI828682, |
| | | | | | AI250293, AI590227, AL043981, AI696612, AI824746, AW274192, |
| | | | | | AI572676, AI583065, AI584140, AL041150, AI536685, AI436456, |
| | | | | | AW020561, AI538259, AI570909, AI499131, AW082113, AA835801, |
| | | | | | AI567846, AI567993, AI432656, AI475371, AL121328, AI431975, |
| | | | | | AW403717, AW073270, AW168795, AI857296, AI701074, AI612913, |
| | | | | | AI625079, AW148363, AI627360, AL042551, AI540832, AI863014, |
| | | | | | AW149869, AI567128, AI635461, AI274508, AI499512, AW080327, |
| | | | | | AI889133, AI445432, AW075667, AI284517, AI434223, AI859511, |
| | | | | | AI590118, AI538829, AI654750, AW167924, AI538218, AI687362, |
| | | | | | AW148716, AI862144, AL119791, AW082040, AL042628, AI679990, |
| | | | | | AI913437, AL121270, AI886124, AI687728, AI590021, AW301505, |
| | | | | | AI224992, AI349598, AW170635, AI784252, AI697137, AI682841, |
| | | | | | AI610756, AI521012, AI801608, AI819326, AI590120, AI499285, |
| | | | | | AI521040, AI679321, AW086113, AW118398, AW103371, AW008048, |
| | | | | | AL042745, AI274013, AL036736, AI633419, AW166903, AI064830, |
| | | | | | AI862139, AI801322, AI539780, AI690426, AI630928, AI289937, |
| | | | | | AW169653, AI610645, AI801325, AI636445, AI634345, AI818683, |
| | | | | | AI609580, AI364788, AI500146, AI280637, AI884469, AI434281, |
| | | | | | AI569616, AC007860, I48979, I89947, I48978, S68736, AL050149, |
| | | | | | AF090901, AL110196, AL133080, A08916, AL117460, AL110221, |
| | | | | | AF113019, Y11254, I89931, AL122050, A08913, AF118070, AF090934, |
| | | | | | AF078844, AF113676, AL050138, AL122123, E07361, X84990, |
| | | | | | AF113677, AF158248, X82434, AL137557, AJ000937, AL133640, |
| | | | | | AF111851, AL050116, X63574, AL122121, AF106862, Y16645, |
| | | | | | AF118094, S78214, AF017152, AL049314, AL137283, A65341, |
| | | | | | AL080124, AL133075, AF104032, E03348, AF113689, AF113694, |
| | | | | | Y11587, AL133016, AB019565, AF090900, AL049452, AL080060, |
| | | | | | AL122093, U42766, AL050277, AR059958, AF090903, AF125949, |
| | | | | | AF090943, AL137459, AL117457, AL050108, AF090896, AL137527, |
| | | | | | A93016, AF113691, AF113699, I49625, AL133557, AL096744, |
| | | | | | AL050393, AF079765, AF146568, AL133565, AF113690, AL049938, |
| | | | | | AF113013, AJ242859, L31396, AF091084, L31397, AF125948, |
| | | | | | AF017437, AF118064, AL133093, AL080137, AL050146, AL117394, |
| | | | | | AL133606, AL110225, AL049466, AL049382, AL049430, AC002086, |
| | | | | | U91329, AF097996, E02349, AJ238278, AL137550, AR011880, |
| | | | | | A08910, AL133560, AL117585, A58524, A58523, AL049464, |
| | | | | | AF177401, AL122098, E07108, AL122049, AL049300, Z82022, |
| | | | | | AL034402, AL117583, AF067728, A08912, AF183393, U00763, |
| | | | | | U35846, A77033, A77035, I03321, AL117435, A08909, AL050024, |
| | | | | | AL137271, X72889, AL137463, I33392, AL133113, X70685, |
| | | | | | AL022165, AL133568, AL137648, X65873, AL122110, AL049283, |
| | | | | | AL137560, AL137538, A03736, U72620, X96540, X93495, A12297, |
| | | | | | AL080159, U80742, X98834, I09360, AL080127, AJ012755, AF087943, |
| | | | | | U67958, AL133072, AL110197, AF061943, E08263, E08264, |
| | | | | | AF000145, AF153205, AL137523, S61953, AC006336, AL133104, |
| | | | | | AL050172, X53587, I42402, AL137521, Y09972, AL133014, |
| | | | | | AF111112, AL122111, AC002464, AC005940, E15569, AL133077, |
| | | | | | AF119337, A93350, I26207, I66342, AF026816, AL137526, I17767, |
| | | | | | AC008394, AF026124, AC006371, AF079763, AL137556, AF095901, |
| | | | | | AC004383, U68387, A08911, Z37987, Y14314, I00734, E00617, |
| | | | | | E00717, E00778, AR000496, U39656, AF185576, AL122118, |
| | | | | | AR054984, AR038969, M30514, AL137476, AL133067, and |
| | | | | | AF057300. |
| HOVEU10 | 45 | 961865 | 1-595 | 15-609 | Z99396, AW392670, U46351, AL042450, AL043019, AL043033, |
| | | | | | U46341, U46350, AL119324, AL043008, AL119457, AL119335, |
| | | | | | AL042989, AL119401, AL134536, U46347, AL043029, AL134525, |
| | | | | | AL042614, AL043003, AL134531, and AR066494. |
| HOVEU06 | 46 | 933737 | 1-324 | 15-338 | |
| HOVEO04 | 47 | 926209 | 1-165 | 15-179 | W24148. |
| HOVEE20 | 48 | 909030 | 1-432 | 15-446 | N77523, AW371758, AA295628, AF150239, AA351493, and |
| | | | | | AF161544. |
| HOVDD82 | 49 | 948619 | 1-514 | 15-528 | AA814916, Z99396, AL036858, AL119319, AW392670, AL036924, |
| | | | | | AL036418, AL038837, AA631969, AL119443, AL037051, AL036725, |
| | | | | | AL037094, AW372827, AW384394, AL119497, AW363220, U46349, |
| | | | | | U46351, U46341, AL119341, AL037085, AL119483, AL039074, |
| | | | | | AL037639, AL119335, U46350, AL036196, AL037082, AL119457, |
| | | | | | AL119324, AL037077, U46345, AL119484, AL119363, AL119391, |
| | | | | | AL119355, U46346, AL134920, AL119522, AL119396, AL119418, |
| | | | | | AL042975, U46347, AL038509, AL119444, AL119496, AL039564, |
| | | | | | AL039085, AL039156, AL134533, AL042965, AL039108, AL039109, |
| | | | | | AL039128, AL042433, AL042614, AL119464, AL119439, AL119399, |
| | | | | | AL134902, AL042984, AL037615, AL036268, AL134531, AI142131, |
| | | | | | AL036190, AL037526, AL134538, AL042551, AL036733, AL038520, |
| | | | | | AL043019, AL042970, AL038531, AL134529, AL042450, AL036767, |
| | | | | | AL043029, AL042544, AL042542, AL119488, AL036238, AL038851, |
| | | | | | AL043003, AL036998, AL037178, AL037027, AL036679, AL036191, |
| | | | | | AR060234, AR066494, A81671, AR023813, AR064707, AR069079, |
| | | | | | AB026436, and AR054110. |
| HOVDD10 | 50 | 961887 | 1-391 | 15-405 | N43177. |
| HOVCP77 | 51 | 772210 | 1-604 | 15-618 | R41728, H24352, R39867, R60774, F10382, R59965, R45695, Z38252, |
| | | | | | R42431, D81791, R45265, and F01387. |
| HOVCO50 | 52 | 932544 | 1-572 | 15-586 | AW235624, AI703030, W56086, AA442067, AA460968, AA478475, |
| | | | | | AA830981, AA767533, and AI193242. |
| HOVCN57 | 53 | 734779 | 1-455 | 15-469 | H44610. |
| HOVCM77 | 54 | 772208 | 1-429 | 15-443 | R61245, AP000495, and AC002076. |
| HOVCM03 | 55 | 924196 | 1-304 | 15-318 | AI193258. |
| HOVCI89 | 56 | 786917 | 1-321 | 15-335 | AA436552, AI280208, AA885577, AI692637, AI435485, and Z99289. |
| HOVCI08 | 57 | 959470 | 1-1020 | 15-1034 | AA634064, AW082209, AA781620, R50614, R53385, AI991409, |
| | | | | | AA035741, H39673, Z59735, Z54887, Z54886, and Z65048. |
| HOVCD33 | 58 | 702445 | 1-315 | 15-329 | R44210, and AL040454. |
| HOVCC57 | 59 | 465313 | 1-393 | 15-407 | AI347543, AI004448, and T40955. |
| HOVBQ07 | 60 | 858863 | 1-591 | 15-605 | AA552163, AA469920, AW205550, AW341591, AI742174, AI620502, |
| | | | | | AW027003, W91950, AW026996, W91877, AI215036, AI207964, and |
| | | | | | AA523613. |
| HOVBK69 | 61 | 757594 | 1-411 | 15-425 | AA436185, AW052178, H96098, AA653580, and AA416482. |
| HOVBK38 | 62 | 956238 | 1-663 | 15-677 | AI140254, AA948324, AA251283, AA862605, AI240375, AA825275, |
| | | | | | AA999858, AI301152, AI342674, AA011200, AA815310, W58239, |
| | | | | | AA931576, AI094483, AI302269, AI202732, AA649941, AI342676, |
| | | | | | R71253, AA449275, AI383771, AI831916, AI308112, R12392, |
| | | | | | AA525847, H52934, H06918, R34144, W58328, AI695242, R71305, |
| | | | | | AA876287, W89053, N93696, AA005209, AA251692, R34143, |
| | | | | | W89107, and AC006251. |
| HOVBK24 | 63 | 858857 | 1-395 | 15-409 | T96953, and T72381. |
| HOVBI67 | 64 | 751665 | 1-861 | 15-875 | AI040113, W87283, AA700434, W87282, and AC004975. |
| HOVBI20 | 65 | 669730 | 1-215 | 15-229 | H80446. |
| HOVAZ89 | 66 | 904818 | 1-483 | 15-497 | |
| HOVAZ65 | 67 | 750273 | 1-445 | 15-459 | AA406496, N46132, AA406518, and H96338. |
| HOVAY88 | 68 | 827077 | 1-397 | 15-411 | |
| HOVAY58 | 69 | 736077 | 1-472 | 15-486 | H01079. |
| HOVAY42 | 70 | 713812 | 1-373 | 15-387 | |
| HOVAY03 | 71 | 921959 | 1-276 | 15-290 | AL139054. |
| HOVAW62 | 72 | 745704 | 1-234 | 15-248 | AA062554, AI869336, AW170609, H13995, AA631622, H13997, |
| | | | | | H14028, AI569586, AA632137, and AC004143. |
| HOVAO25 | 73 | 678163 | 1-361 | 15-375 | H57248. |
| HOVAN51 | 74 | 725005 | 1-535 | 15-549 | T79639, N70408, N57728, T83855, AA001363, AI078086, T93794, and |
| | | | | | W03748. |
| HOVAJ07 | 75 | 953422 | 1-438 | 15-452 | H26739, AI668579, AI733528, and AL020995. |
| HOVAI05 | 76 | 932093 | 1-453 | 15-467 | AI031837, AI985078, T25928, AC003692, AL121973, AC004019, |
| | | | | | AL049766, and AL121603. |
| HOVAF07 | 77 | 953553 | 1-151 | 15-165 | AA828882, and AA829114. |
| HOVAF01 | 78 | 916770 | 1-413 | 15-427 | AI252937, N74027, AA836182, AW338228, AI744524, AA910108, |
| | | | | | AA772555, AI027046, AI823533, F02523, AI823535, AW102980, |
| | | | | | AA745302, AI371165, AW002825, AA887470, AF001549, AP000502, |
| | | | | | AC004651, AC002996, U91318, AF134726, AF053356, AC000353, |
| | | | | | AL023575, AC004820, AP000113, AP000045, AC004985, AL031587, |
| | | | | | AC002073, AC005288, AC005821, AC002310, AC004967, AC005071, |
| | | | | | Z93930, AP000553, AC007041, AC004703, AC006014, AC004552, |
| | | | | | AL023801, AC005015, AL035249, AC005081, AC007371, AC007216, |
| | | | | | AP000299, AL136295, AL031230, AL034549, AC003689, AL109628, |
| | | | | | AC004834, AC007358, Z98941, AC005620, AC007955, AC007382, |
| | | | | | AC007191, AC005765, AC006241, AL020997, AL031283, U91326, |
| | | | | | AL031659, AC005789, AC002544, AC005837, AL122023, AC005874, |
| | | | | | AF134471, AC004814, AC003047, AC005823, AC005086, AC004883, |
| | | | | | AL049843, AL009181, AL022323, AL008715, Z98200, AC012330, |
| | | | | | S79836, U11297, AL049832, AL096791, AL033547, AC002477, |
| | | | | | AC004125, AL050317, AC004882, AL031846, AC002357, AC002549, |
| | | | | | Z94801, AC007325, AL035405, AC007981, L47234, AC005911, |
| | | | | | AC000075, U80017, AC007151, AC002400, AC008079, U78027, |
| | | | | | AC004531, AC004983, AC004217, AJ003147, AF045555, AC004837, |
| | | | | | AC004257, AC006101, AC004953, AC004966, AC005363, AL050325, |
| | | | | | AC005606, AC006088, AC020663, AC007688, Z81364, AL024507, |
| | | | | | AC004832, U95742, AL022476, Z92542, AC004583, AF039907, |
| | | | | | AP000208, AC006544, AC005225, AP000247, AC007229, AL109627, |
| | | | | | AC008132, AF030453, Z99943, AC002553, Z97183, and AL049748. |
| HOVAC77 | 79 | 578783 | 1-353 | 15-367 | |
| HOVAC54 | 80 | 578809 | 1-499 | 15-513 | R06198. |
| HOVAC26 | 81 | 578810 | 1-410 | 15-424 | AA180856, AA312397, AA477002, N64587, F03493, AA722297, |
| | | | | | AA550850, AI141130, AW246295, X56997, AC005253, AL133448, |
| | | | | | AC002477, AC003663, AJ003147, AC007308, AC006064, AL022320, |
| | | | | | AC007421, AL022323, AC005632, AC006480, AP000704, Z83840, |
| | | | | | AC005786, AL049779, Z85986, AC005520, AC005004, AL132712, |
| | | | | | Z98036, AC005274, AC007637, AC005089, AB023049, AC005231, |
| | | | | | AL049776, AC005180, AL133353, AC007676, AC009516, AC007298, |
| | | | | | AC006285, AC005940, AC005081, AL031295, AP000356, AC006211, |
| | | | | | AL021707, U63721, AC006101, AC004883, AC005048, AC020663, |
| | | | | | AC000134, AC012627, AC005488, AC007546, AP000065, AL080243, |
| | | | | | AC006511, AC002470, AL078638, AP000049, AC005332, U85195, |
| | | | | | AC004019, AP000311, AC005531, AC004491, AE000658, AL135744, |
| | | | | | AC005412, AL023553, AL008582, AP000557, AC005391, AL139054, |
| | | | | | AC002365, AC006538, AP000116, AP000555, AC006014, AL031733, |
| | | | | | AC007226, AF003529, AL031589, AC006449, U82668, AF134726, |
| | | | | | AC005971, AC004890, AC005841, AP000509, AL022721, AP000343, |
| | | | | | AC003977, AP000248, Z98950, AL079342, AL050318, AL049569, |
| | | | | | AC005005, AC004253, AC005243, AC005899, AP000556, AL031848, |
| | | | | | AC002347, AC004000, AC005229, AL133445, AC005184, AC006026, |
| | | | | | AC005029, AL132777, AC007227, AC016025, AC005519, AC003962, |
| | | | | | AL109627, AC004139, AL035398, AL031432, AL078581, D87675, |
| | | | | | AL020993, AC003029, AP000212, AP000134, and AL031282. |
| HOVAB85 | 82 | 578788 | 1-394 | 15-408 | AA938198, AI480041, and AA836516. |
| HOVAB61 | 83 | 578791 | 1-672 | 15-686 | AI912696, AA189100, AA449441, AI298393, N66646, AI281387, |
| | | | | | N66606, AA448930, T40424, T41267, N22111, AL096827, and |
| | | | | | AF086039. |
| HOOAB23 | 84 | 522227 | 1-542 | 15-556 | AW292981, AA363225, AA363226, AI250281, AI912329, AI745457, |
| | | | | | AI815151, AI744548, AI760693, AA076391, H74235, AA491864, |
| | | | | | AA557604, AW301854, AA601230, AL079769, W60522, AI370264, |
| | | | | | AA501906, H63742, AC005544, AC005921, AF053356, AC016025, |
| | | | | | AC006285, AC005702, AB023048, AF165926, AC005280, AL035089, |
| | | | | | AC007262, AC004000, AL031848, AC005529, AC004150, AL132777, |
| | | | | | AL049874, AC005844, AC006354, AL031733, AC005212, AL009181, |
| | | | | | AC005071, Z95113, AC007540, AL109865, AC007993, AC005520, |
| | | | | | AC004099, AF109907, AC002470, AF030453, AC000085, AC006958, |
| | | | | | D84394, AC005881, AL033527, AL133163, AL021154, AF152364, |
| | | | | | AL109839, AF118808, AC005261, AC005015, AL135744, AC009516, |
| | | | | | AC004797, AC002350, Z95152, AC005004, AC004686, AC005200, |
| | | | | | Z92542, AL031666, AF196779, AC002117, AL133448, AC005193, |
| | | | | | AC004253, AP000512, Z85986, AC004858, AC006344, AC005081, |
| | | | | | U82828, AL022336, AC004458, AC004963, AC006203, AC005726, |
| | | | | | AC002544, AC004841, AL022328, AP000553, AC005191, AL049694, |
| | | | | | AC004491, AC007055, AC003070, AC007207, AC006547, AC004531, |
| | | | | | AC016027, AP000689, AC006160, AC016830, AL022316, AC005288, |
| | | | | | AC005067, AC004659, L78833, AC005488, AL049758, AF088219, |
| | | | | | AC003982, AC006111, AP000555, AC006057, AC005694, AL049539, |
| | | | | | AC005065, AC000025, AL050307, AL022238, AF190465, AL034379, |
| | | | | | AC004970, AP000155, AP000013, AC004675, AB001523, Z83840, |
| | | | | | Z98941, AF067844, AL020993, Z82215, AC010209, AF200465, |
| | | | | | Z83843, AC007011, AC006101, and AC004024. |
| HOOAB05 | 85 | 932925 | 1-569 | 15-583 | AI080164, and AA363261. |
| HONAK10 | 86 | 968610 | 1-324 | 15-338 | AA362963, AA281759, AW117976, AL135744, AF196969, AC006539, |
| | | | | | AC006077, AL049850, AC009516, AC004678, AP000553, AC005372, |
| | | | | | AC005411, AL049780, AP000114, and AP000046. |
| HONAH06 | 87 | 936029 | 1-1105 | 15-1119 | AA362851, AI499938, AW085790, AA488903, AL043009, AW069227, |
| | | | | | AA443390, AA569648, AW304580, AA281461, AA547979, AL041706, |
| | | | | | AI688846, AW022934, AW021161, AW193432, AI634187, F36273, |
| | | | | | AI510838, AI344844, AW269488, AI061334, T47138, AI049709, |
| | | | | | AI471481, AW193265, AI963720, AI560085, AL079869, AI287651, |
| | | | | | AL046409, AW438643, AI341664, AI350211, AI755214, AI369580, |
| | | | | | AI334443, AI279165, AI148277, AW162489, AW270270, AI619997, |
| | | | | | AA581903, AW338035, AA350859, AW338021, AI754567, AI375710, |
| | | | | | AA610491, AI457313, AI613280, AI754105, AI355206, AA493708, |
| | | | | | AL079645, AI587583, AL119691, AI587565, AW270716, AW148792, |
| | | | | | H73550, T74524, AI431303, AW276827, AA714453, AI635279, |
| | | | | | AA169194, AA348311, AA483606, AI291268, AI291124, AI380617, |
| | | | | | AI287451, AW419389, AI687343, AA631507, AA167792, AI801600, |
| | | | | | AI053672, AA570740, AI371070, AA758934, AI284640, AI270117, |
| | | | | | AI801591, AW327868, AI340453, AI761471, AA181773, AI801482, |
| | | | | | AA599920, AI589230, AL135377, AA491814, AI471572, AI744995, |
| | | | | | AI379719, AA177061, AI912322, AI635819, AI017024, AW022379, |
| | | | | | AI733856, AW023672, AL118991, A1583142, AA577906, AW245354, |
| | | | | | AA847499, AI537506, AI446259, AA719805, AW237905, AI860020, |
| | | | | | AI300054, AC005730, AC002377, AC007240, AC005180, AC004531, |
| | | | | | AL049588, AC008372, AC005486, AL049776, AC006285, AL031602, |
| | | | | | AC002404, AC009784, AC005274, AC004453, AC004019, AC006064, |
| | | | | | AP000049, AL035659, AC005620, AC004596, AC005081, AC004859, |
| | | | | | AC005215, AP000311, AL121653, AC006111, AL080243, AC004890, |
| | | | | | AC005529, AP000511, AL022163, AC005015, AL021707, AP000555, |
| | | | | | AL139054, AC004707, AC016025, AP000501, AC005280, AC006449, |
| | | | | | AL133246, AC006312, AC007308, AC004650, AC005011, AL121578, |
| | | | | | AC006544, AC000052, AC005913, AL050332, AC005288, Z98752, |
| | | | | | AC012599, AC006254, AC006597, Z84487, AC006130, AC002350, |
| | | | | | AF196969, AC004028, AC005520, U95742, AC006596, AC004150, |
| | | | | | AC007227, AL132712, AL049643, AC003957, AC003982, AC005778, |
| | | | | | AC005088, AC005488, AL034549, AC006057, AC006538, Z98885, |
| | | | | | AC006480, AP000088, Z92542, AF053356, AL133448, AC002091, |
| | | | | | AL121655, AL035072, AL109984, AJ229041, AC004967, AC004745, |
| | | | | | AC005071, AC007546, AC006543, AC008044, AL133289, AF165926, |
| | | | | | Z98044, AC005924, AP000557, AL031311, AC004922, AL049692, |
| | | | | | U80017, AC005874, AF134471, AL031589, U89337, D87675, |
| | | | | | AC008150, AF117829, AC004638, AC005031, AC007055, AL022165, |
| | | | | | AP000034, AL049766, AC007666, AC004985, AL033525, U85195, |
| | | | | | AL031295, AC004797, AL009181, AJ246003, AC005089, AC005899, |
| | | | | | AL035423, AL021453, AL135744, Y14768, AC004526, AC002059, |
| | | | | | AC004799, AC004675, AC009516, AC000025, AF049895, AC004913, |
| | | | | | AP000556, AC005291, AP000356, AL121658, AC004812, AC006079, |
| | | | | | AF200465, AP000513, AC007919, AF205588, AC007292, AC007536, |
| | | | | | AC000075, AC002301, AF001549, AC007731, AC004686, AC005324, |
| | | | | | Z97352, AC002395, Z82215, Z98742, AF108083, AJ011930, AC003101, |
| | | | | | AC007999, AC005500, AL022326, AP000031, Z86061, AP000558, |
| | | | | | AC005028, AL021392, AC002369, AC005519, AC004764, AC002996, |
| | | | | | AB000882, AC003104, AC008115, U47924, Z94044, AC007371, |
| | | | | | AE000658, AC005057, AL022320, AF088219, AF111168, AC004033, |
| | | | | | AP000512, AL022328, AC007216, AF029308, U91319, AC005666, |
| | | | | | AL049636, AC007684, AL049709, D88270, AL009179, AC005632, |
| | | | | | AL109628, AC010168, AC006966, Z98200, AC004477, AF001552, |
| | | | | | Z85987, AC005736, AC004087, AC004821, AP000359, AC005722, |
| | | | | | AC000353, AC004999, AC005600, Z85996, AC007207, AF134726, |
| | | | | | AP000143, AL031427, AL033521, AC005387, AF190465, AL021937, |
| | | | | | AC005212, AC005229, AC005562, AL096701, AL031774, AC005696, |
| | | | | | AC006001, AC006211, AC002425, AL031255, AC018633, AJ003147, |
| | | | | | AC007011, AC005911, AL049869, AL022322, AC020663, Z94056, |
| | | | | | AC007406, AC005531, AC002365, AP000505, AC004933, AJ010770, |
| | | | | | AL035681, AL035422, AL096712, and Z95114. |
| HONAE50 | 88 | 723571 | 1-545 | 15-559 | W86672, and AA362593. |
| HONAD65 | 89 | 747152 | 1-290 | 15-304 | AA362745, and AA085323. |
| HONAD02 | 90 | 859016 | 1-1041 | 15-1055 | AA362710, AI873444, AA889371, AW376675, AI261617, AW376657, |
| | | | | | AW390112, AW376696, AI857990, AI431824, AI963829, AI632752, |
| | | | | | AI590245, AI953341, AW376640, AA888092, AF118395, and |
| | | | | | AF118855. |
| HNOJJ12 | 91 | 969077 | 1-1757 | 15-1771 | AW295026, AI276473, AI553987, H08317, AI955362, H50857, |
| | | | | | W38821, T75180, R56504, T70815, F12882, R19236, T78969, R20397, |
| | | | | | T98878, R19579, AI312653, H95935, AA090801, AA361971, |
| | | | | | AA479557, R92663, AA454914, AI659055, AI480397, AI524497, |
| | | | | | AI440293, AA788769, AI589107, AA630007, AI380567, AA564726, |
| | | | | | AI262311, AW027577, AI766536, AI332995, AA044714, AA100613, |
| | | | | | AI471849, AI674449, AI190957, AI632486, AI891104, AI298730, |
| | | | | | T77169, R45788, H22006, T86237, R80609, T83221, H20293, |
| | | | | | AI690130, AA368757, AW179044, W73553, N80081, AA730555, |
| | | | | | AI338393, and D25218. |
| HNOAD04 | 92 | 926258 | 1-745 | 15-759 | AA814415, AI378392, N45120, AI457108, AA809495, AA835661, |
| | | | | | AA831169, AI351546, R43018, R44581, AI824326, and AW136327. |
| HNBVH02 | 93 | 917719 | 1-272 | 15-286 | AI128931, N59410, H71850, H68617, AW026005, H72896, R89336, |
| | | | | | R89422, AI890794, AL120188, AL117354, Y10196, and AC005535. |
| HNBVC03 | 94 | 922402 | 1-384 | 15-398 | AA455727. |
| HNBUQ06 | 95 | 933673 | 1-633 | 15-647 | AI003929, AI203393, AI434650, AI741385, AI239480, AA931467, |
| | | | | | AI819627, AW183189, F31423, F35609, AA905778, F21790, and |
| | | | | | AW105048. |
| HNBUO01 | 96 | 914361 | 1-520 | 15-534 | AA501715. |
| HNBUI10 | 97 | 961734 | 1-483 | 15-497 | AA954976, AI017449, T89711, W69257, AI150048, AA534436, |
| | | | | | T89631, AI261657, AW166311, AI627633, AA947856, W69170, |
| | | | | | AI831660, AI473887, AA909065, AI140835, AA862617, AW449791, |
| | | | | | AW445047, T89808, and AI795971. |
| HBNBQ50 | 98 | 887096 | 1-604 | 15-618 | AA481928, AW370602, AA130551, AA410947, H02520, AA477170, |
| | | | | | AW362159, AW362184, AI683337, AI151512, AW362163, AW024950, |
| | | | | | AW362162, AA295138, AW364082, AA434486, AI346658, AI247124, |
| | | | | | AA434390, AI560635, AI922390, AW193870, AW261977, AI813439, |
| | | | | | AW050855, AW272323, AI889939, AI633003, AA913117, AI917569, |
| | | | | | AA862055, AI819001, AA559250, AI589941, AI356811, R72882, |
| | | | | | AW304202, AI627873, N94336, AA480065, AW130311, AI889450, |
| | | | | | AW083447, AI631391, AI081435, R93337, AW074375, AW027034, |
| | | | | | AA527492, W49844, T40555, AI673235, AA010655, H00902, |
| | | | | | AA211365, AI824358, R66066, AW297543, AA863216, AA568472, |
| | | | | | AA872583, AA740278, R16077, AW070819, AA877152, AA130587, |
| | | | | | R72869, AI349088, R72008, AI682945, AI922396, AI682950, |
| | | | | | AA533970, AA047596, H00901, AA010656, R72471, R15713, R67665, |
| | | | | | R73357, AI890961, AI801834, AA745829, R73342, AW337286, |
| | | | | | AW384044, X14856, and A08001. |
| HBNBO30 | 99 | 430360 | 1-442 | 15-456 | H41301, R36910, AA894644, R87213, H15246, T23507, AI222616, and |
| | | | | | AB002320. |
| HBNBL29 | 100 | 703113 | 1-397 | 15-411 | R18010, AI680708, and AI635217. |
| HBNBJ29 | 101 | 907015 | 1-320 | 15-334 | AA935421. |
| HBNBJ06 | 102 | 960664 | 1-284 | 15-298 | AI369384, and AA719568. |
| HBNBB41 | 103 | 712676 | 1-601 | 15-615 | H95264, AI680749, AI672415, AI492506, AI633630, AI628076, |
| | | | | | AA699651, AI090129, N73745, AI434427, AI480111, AW088604, |
| | | | | | AA988606, AA917930, AA236877, AW300229, AI942393, AI271713, |
| | | | | | AI627960, AA701995, AI911527, AI693888, AI765976, AA424737, |
| | | | | | AI984791, AI672498, N38876, AW300532, N66066, W86671, |
| | | | | | AI478472, AW271444, AI540292, AI350589, AA505970, AA724554, |
| | | | | | AA905114, AI141611, AA625745, AI623282, AA677788, AI758154, |
| | | | | | AA553728, AW243369, AI915897, H39811, AI038544, AA904754, |
| | | | | | F28995, AA953543, H78001, T69270, T67436, H24986, AA235920, |
| | | | | | Z19235, AI927054, R08315, H81259, T99814, H26910, AI341446, |
| | | | | | R05488, R05808, C21030, and H39812. |
| HBNBB27 | 104 | 600905 | 1-130 | 15-144 | |
| HBNBB09 | 105 | 868924 | 1-360 | 15-374 | R42401, H17978, AA412292, AA470014, AA632915, AI147693, |
| | | | | | AI347038, AI308941, AA135185, AA583432, AA836857, AA018749, |
| | | | | | AA299011, AA528216, AA516435, AA916348, AA514541, N62509, |
| | | | | | AI350971, AA494556, and AF184971. |
| HBNAW73 | 106 | 764716 | 1-285 | 15-299 | AI190941, R86172, H25501, and Z99289. |
| HBNAC74 | 107 | 586797 | 1-140 | 15-154 | AA318750, AA482345, AA281903, AA305550, AA975640, AW411095, |
| | | | | | AJ130978, and AF099149. |
| HBNAC71 | 108 | 525831 | 1-305 | 15-319 | |
| HBNAC48 | 109 | 721983 | 1-338 | 15-352 | AA078532, AC006014, AC005488, AC005049, and AL009172. |
| HBNAC42 | 110 | 714263 | 1-408 | 15-422 | AA190822. |
| HBNAC32 | 111 | 526549 | 1-206 | 15-220 | C14348, AI074047, AF007887, AI078283, C14340, N63997, N62637, |
| | | | | | AI457357, C14382, AI299045, D25956, AW339264, AI347344, |
| | | | | | AW135793, AI952780, AI337314, AW166959, AL080011, R81679, |
| | | | | | AW089495, AI440133, AI521589, AA581403, AI634350, AA836392, |
| | | | | | AI671661, AI281867, AL046227, AW073858, AI832245, AI636588, |
| | | | | | AL037582, AL037602, AW022682, AI610362, AI817545, AI824746, |
| | | | | | AI613038, AI583578, AI612913, AI249946, AW023338, AI860897, |
| | | | | | AW007555, AW161202, AL039730, AI470293, AW087199, AI305745, |
| | | | | | AI635892, AW132034, AI434969, AI245008, AI628325, AI817373, |
| | | | | | AI440284, AI289310, AI682891, AI687568, AI432570, AI288285, |
| | | | | | AW327527, AI538850, AI277008, AI690813, AI285514, AI471898, |
| | | | | | AI918634, AI933992, AW088944, AI452560, AW265004, AW198112, |
| | | | | | AW020358, AI491904, AI621341, AI631107, AI699211, AI623941, |
| | | | | | AL043089, AI954080, AI889148, AL038529, AI587302, AW150308, |
| | | | | | AI679550, AI678688, AI287446, AW090387, AW058233, AI862135, |
| | | | | | AL119457, AW264727, AI587156, AI926041, AI005511, AI682968, |
| | | | | | AI921633, AW166870, AI476109, AI912434, AW411043, AI934011, |
| | | | | | AI890051, AI446511, N25033, AW085709, AA814990, AI241741, |
| | | | | | AW167157, AW366372, AI758988, AI783569, AW194014, AI885999, |
| | | | | | AI922315, AW161098, AW167926, AI635016, AW026905, AI270039, |
| | | | | | AI862139, AI929108, AI885982, AW089233, AL121041, AI918408, |
| | | | | | AI696846, AI537076, AI584130, AI469516, AI698391, AI250627, |
| | | | | | AI623682, AI683634, AI680498, AI961589, AI828568, AI493567, |
| | | | | | AI963191, AA848053, AI620639, AI589428, AA693314, AA514684, |
| | | | | | AI933001, AI890391, AI818562, AI683497, AI269580, AW089387, |
| | | | | | AI624548, AI927233, AA856697, AW084151, AI697372, AW169234, |
| | | | | | Z98519, AL048644, AI537187, AI828734, AI361701, AI435253, |
| | | | | | AW079432, AI918554, AI457188, AI609556, AL120987, AA760655, |
| | | | | | AI499621, AI884459, AW080076, AI701975, AW268122, AI924686, |
| | | | | | AI687168, AW118414, AI280561, AA768369, AI363957, AI572017, |
| | | | | | AI783504, AI282669, AW075608, AI922689, AI374987, AI633061, |
| | | | | | AI554344, AI802542, AI571529, AI702527, AF113694, AL035458, |
| | | | | | AL021393, AL035587, AC005091, AC004383, AC004987, AL034400, |
| | | | | | AL031346, AC007358, AL031984, AC004822, AL137705, AC002287, |
| | | | | | AL049761, AC004797, AC004943, AC005291, Z99297, AC005225, |
| | | | | | AF042090, AP000697, AL121603, AC007390, AC007172, AP000514, |
| | | | | | Z82206, AC005876, AC005250, AC002471, AC005374, AC000053, |
| | | | | | AP000340, Z49258, Z83840, AC006313, L78810, AL049776, |
| | | | | | AC004470, AC002467, AC006501, AF095901, AC004686, AP000250, |
| | | | | | AP000133, AP000211, AP000030, AL034417, AC004213, AC002060, |
| | | | | | Z98949, AL022165, AC004227, AC007384, AC006039, AL009179, |
| | | | | | Z83844, and AL035407. |
| HBNAC28 | 112 | 525832 | 1-307 | 15-321 | AC007539. |
| HBNAC25 | 113 | 525834 | 1-132 | 15-146 | |
| HBNAC09 | 114 | 525833 | 1-63 | 15-77 | AA604441, AI690219, AI693458, AA508848, AA447094, AA830582, |
| | | | | | AI703075, AW003969, AW189292, AW014124, AA831149, AI278956, |
| | | | | | AI922983, AA908927, AI703009, AA455884, AI870286, AI160778, |
| | | | | | AI873461, AI636871, AJ245433, AP000504, and AF129756. |
| HBNAC02 | 115 | 921187 | 1-187 | 15-201 | |

[0096] TABLE 4

| Code | Description | Tissue | Organ | Cell Line | Disease | Vector |
|---|---|---|---|---|---|---|
| AR022 | a Heart | a Heart | | | | |
| AR023 | a Liver | a Liver | | | | |
| AR024 | a_mammary | a_mammary | | | | |
| | gland | gland | | | | |
| AR025 | a Prostate | a Prostate | | | | |
| AR026 | a small intestine | a small intestine | | | | |
| AR027 | a Stomach | a Stomach | | | | |
| AR028 | Blood B cells | Blood B cells | | | | |
| AR029 | Blood B cells | Blood B cells | | | | |
| | activated | activated | | | | |
| AR030 | Blood B cells | Blood B cells | | | | |
| | resting | resting | | | | |
| AR031 | Blood T cells | Blood T cells | | | | |
| | activated | activated | | | | |
| AR032 | Blood T cells | Blood T cells | | | | |
| | resting | resting | | | | |
| AR033 | brain | brain | | | | |
| AR034 | breast | breast | | | | |
| AR035 | breast cancer | breast cancer | | | | |
| AR036 | Cell Line | Cell Line | | | | |
| | CAOV3 | CAOV3 | | | | |
| AR037 | cell line PA-1 | cell line PA-1 | | | | |
| ARO38 | cell line | cell line | | | | |
| | transformed | transformed | | | | |
| AR039 | colon | colon | | | | |
| AR040 | colon | colon | | | | |
| | (9808co65R) | (9808co65R) | | | | |
| AR041 | colon (9809co15) | colon (9809co15) | | | | |
| AR042 | colon cancer | colon cancer | | | | |
| AR043 | colon cancer | colon cancer | | | | |
| | (9808co64R) | (9808co64R) | | | | |
| AR044 | colon cancer | colon cancer | | | | |
| | 9809co14 | 9809co14 | | | | |
| AR045 | corn clone 5 | corn clone 5 | | | | |
| AR046 | corn clone 6 | corn clone 6 | | | | |
| AR047 | corn clone 2 | corn clone 2 | | | | |
| AR048 | corn clone 3 | corn clone 3 | | | | |
| AR049 | Corn Clone 4 | Corn Clone 4 | | | | |
| AR050 | Donor II B Cells | Donor II B Cells | | | | |
| | 24 hrs | 24 hrs | | | | |
| AR051 | Donor II B Cells | Donor II B Cells | | | | |
| | 72 hrs | 72 hrs | | | | |
| AR052 | Donor II B-Cells | Donor II B-Cells | | | | |
| | 24 hrs | 24 hrs | | | | |
| AR053 | Donor II B-Cells | Donor II B-Cells | | | | |
| | 72 hrs | 72 hrs | | | | |
| AR054 | Donor II Resting | Donor II Resting | | | | |
| | B Cells | B Cells | | | | |
| AR055 | Heart | Heart | | | | |
| AR056 | Human Lung | Human Lung | | | | |
| | (clonetech) | (clonetech) | | | | |
| AR057 | Human Mammary | Human Mammary | | | | |
| | (clontech) | (clontech) | | | | |
| AR058 | Human Thymus | Human Thymus | | | | |
| | (clonetech) | (clonetech) | | | | |
| AR059 | Jurkat | Jurkat | | | | |
| | (unstimulated) | (unstimulated) | | | | |
| AR060 | Kidney | Kidney | | | | |
| AR061 | Liver | Liver | | | | |
| AR062 | Liver (Clontech) | Liver (Clontech) | | | | |
| AR063 | Lymphocytes | Lymphocytes | | | | |
| | chronic | chronic | | | | |
| | lymphocytic | lymphocytic | | | | |
| | leukaemia | leukaemia | | | | |
| AR064 | Lymphocytes | Lymphocytes | | | | |
| | diffuse large B | diffuse large B | | | | |
| | cell lymphoma | cell lymphoma | | | | |
| AR065 | Lymphocytes | Lymphocytes | | | | |
| | follicular | follicular | | | | |
| | lymphoma | lymphoma | | | | |
| AR066 | normal breast | normal breast | | | | |
| AR067 | Normal Ovarian | Normal Ovarian | | | | |
| | (4004901) | (4004901) | | | | |
| AR068 | Normal Ovary | Normal Ovary | | | | |
| | 9508G045 | 9508G045 | | | | |
| AR069 | Normal Ovary | Normal Ovary | | | | |
| | 9701G208 | 9701G208 | | | | |
| AR070 | Normal Ovary | Normal Ovary | | | | |
| | 9806G005 | 9806G005 | | | | |
| AR071 | Ovarian Cancer | Ovarian Cancer | | | | |
| AR072 | Ovarian Cancer | Ovarian Cancer | | | | |
| | (9702G001) | (9702G001) | | | | |
| AR073 | Ovarian Cancer | Ovarian Cancer | | | | |
| | (9707G029) | (9707G029) | | | | |
| AR074 | Ovarian Cancer | Ovarian Cancer | | | | |
| | (9804G011) | (9804G011) | | | | |
| AR075 | Ovarian Cancer | Ovarian Cancer | | | | |
| | (9806G019) | (9806G019) | | | | |
| AR076 | Ovarian Cancer | Ovarian Cancer | | | | |
| | (9807G017) | (9807G017) | | | | |
| AR077 | Ovarian Cancer | Ovarian Cancer | | | | |
| | (9809G001) | (9809G001) | | | | |
| AR078 | ovarian cancer | ovarian cancer | | | | |
| | 15799 | 15799 | | | | |
| AR079 | Ovarian Cancer | Ovarian Cancer | | | | |
| | 17717AID | 17717AID | | | | |
| AR080 | Ovarian Cancer | Ovarian Cancer | | | | |
| | 4004664B1 | 4004664B1 | | | | |
| AR081 | Ovarian Cancer | Ovarian Cancer | | | | |
| | 4005315A1 | 4005315A1 | | | | |
| AR082 | ovarian cancer | ovarian cancer | | | | |
| | 94127303 | 94127303 | | | | |
| AR083 | Ovarian Cancer | Ovarian Cancer | | | | |
| | 96069304 | 96069304 | | | | |
| AR084 | Ovarian Cancer | Ovarian Cancer | | | | |
| | 9707G029 | 9707G029 | | | | |
| AR085 | Ovarian Cancer | Ovarian Cancer | | | | |
| | 9807G045 | 9807G045 | | | | |
| AR086 | ovarian cancer | ovarian cancer | | | | |
| | 9809G001 | 9809G001 | | | | |
| AR087 | Ovarian Cancer | Ovarian Cancer | | | | |
| | 9905C032RC | 9905C032RC | | | | |
| AR088 | Ovarian cancer | Ovarian cancer | | | | |
| | 9907 C00 3rd | 9907 C00 3rd | | | | |
| AR089 | Prostate | Prostate | | | | |
| AR090 | Prostate | Prostate | | | | |
| | (clonetech) | (clonetech) | | | | |
| AR091 | prostate cancer | prostate cancer | | | | |
| AR092 | prostate cancer | prostate cancer | | | | |
| | #15176 | #15176 | | | | |
| AR093 | prostate cancer | prostate cancer | | | | |
| | #15509 | #15509 | | | | |
| AR094 | prostate cancer | prostate cancer | | | | |
| | #15673 | #15673 | | | | |
| AR095 | Small Intestine | Small Intestine | | | | |
| | (Clontech) | (Clontech) | | | | |
| AR096 | Spleen | Spleen | | | | |
| AR097 | Thymus T cells | Thymus T cells | | | | |
| | activated | activated | | | | |
| AR098 | Thymus T cells | Thymus T cells | | | | |
| | resting | resting | | | | |
| AR099 | Tonsil | Tonsil | | | | |
| AR100 | Tonsil geminal | Tonsil geminal | | | | |
| | center centroblast | center centroblast | | | | |
| AR101 | Tonsil germinal | Tonsil germinal | | | | |
| | center B cell | center B cell | | | | |
| AR102 | Tonsil lymph | Tonsil lymph | | | | |
| | node | node | | | | |
| AR103 | Tonsil memory B | Tonsil memory B | | | | |
| | cell | cell | | | | |
| AR104 | Whole Brain | Whole Brain | | | | |
| AR105 | Xenograft ES-2 | Xenograft ES-2 | | | | |
| AR106 | Xenograft | Xenograft | | | | |
| | SW626 | SW626 | | | | |
| H0013 | Human 8 Week | Human 8 Week | Embryo | | | Uni-ZAP |
| | Whole Embryo | Old Embryo | | | | XR |
| H0028 | Human Old | Human Old | Ovary | | | pBluescript |
| | Ovary | Ovary | | | | |
| H0040 | Human Testes | Human Testes | Testis | | disease | Uni-ZAP |
| | Tumor | Tumor | | | | XR |
| H0144 | Nine Week Old | 9 Wk Old Early | Embryo | | | Uni-ZAP |
| | Early Stage Human | Stage Human | | | | XR |
| H0188 | Human Normal | Human Normal | Breast | | | Uni-ZAP |
| | Breast | Breast | | | | XR |
| H0194 | Human Cerebellum, | Human | Brain | | | pBluescript |
| | subtracted | Cerebellum | | | | |
| H0252 | Human | Human | Bone | | disease | Uni-ZAP |
| | Osteosarcoma | Osteosarcoma | | | | XR |
| H0316 | HUMAN STOMACH | Human Stomach | Stomach | | | Uni-ZAP |
| | | | | | | XR |
| H0373 | Human Heart | Human Adult | Heart | | | pCMVSport1 |
| | | Heart | | | | |
| H0428 | Human Ovary | Human Ovary | Ovary | | | pSport1 |
| | | Tumor | | | | |
| H0436 | Resting T-Cell | T-Cells | Blood | Cell Line | | pSport1 |
| | Library, II | | | | | |
| H0545 | Human | Human | | | | pCMVSport |
| | endometrial | endometrial | | | | 3.0 |
| | stromal cells-treated | stromal cells- | | | | |
| | with progesterone | treated with proge | | | | |
| H0547 | NTERA2 | NTERA2, | | | | pSport1 |
| | teratocarcinoma cell | Teratocarcinoma | | | | |
| | line + retinoic | cell line | | | | |
| | acid (14 days) | | | | | |
| H0555 | Rejected Kidney, | Human Rejected | Kidney | | disease | pCMVSport |
| | lib 4 | Kidney | | | | 3.0 |
| H0615 | Human Ovarian Cancer | Ovarian Cancer | Ovary | | disease | Uni-ZAP |
| | Reexcision | | | | | XR |
| H0641 | LPS activated derived | LPS activated | | | | pSport1 |
| | dendritic cells | monocyte derived | | | | |
| | | dendritic cells | | | | |
| H0643 | Hep G2 Cells, | Hep G2 Cells | | | | Other |
| | PCR library | | | | | |
| H0647 | Lung, Cancer (4005163 | Invasive poorly | | | disease | pSport1 |
| | B7): Invasive, Poorly | differentiated | | | | |
| | Diff. Adenocarcinoma, | lung | | | | |
| | Metastatic | adenocarcinoma | | | | |
| H0651 | Ovary, Normal: | Normal Ovary | | | | pSport1 |
| | (9805C040R) | | | | | |
| H0662 | Breast, Normal: | Normal Breast - | Breast | | | pSport1 |
| | (4005522B2) | #4005522(B2) | | | | |
| H0687 | Human normal | Human normal | Ovary | | | pCMVSport |
| | ovary (#9610G215) | ovary (#9610G215) | | | | 3.0 |
| S0028 | Smooth muscle, | Smooth muscle | Pulmanary | Cell Line | | Uni-ZAP |
| | control | | artery | | | XR |
| S0212 | Bone Marrow | Bone Marrow | | | | pSport1 |
| | Stromal | Stromal | | | | |
| | Cell, untreated | Cell,untreated | | | | |
| S0354 | Colon Normal II | Colon Normal | Colon | | | pSport1 |
| S0422 | Mo7e Cell Line | Mo7e Cell Line | | | | pCMVSport |
| | GM-CSF treated | GM-CSF treated | | | | 3.0 |
| | (1 ng/ml) | (1 ng/ml) | | | | |
| T0068 | Normal Ovary, | Normal Ovary, | | | | Bluescript |
| | Premenopausal | Premenopausal | | | | SK- |
| L0361 | Stratagene ovary | | ovary | | | pBluescript |
| | (#937217) | | | | | SK |
| L0369 | NCI_CGAP_AA1 | adrenal | adrenal | | | Bluescript |
| | | adenoma | gland | | | SK- |
| L0411 | 1-NIB | | | | | Lafmid BA |
| L0439 | Soares infant brain | | whole brain | | | Lafmid BA |
| | 1NIB | | | | | |
| L0462 | WATM1 | | | | | lambda |
| | | | | | | gt11 |
| L0516 | Chromosome 19p12- | | | | | pAMP10 |
| | p13.1 exon | | | | | |
| L0520 | NCI_CGAP_Alv1 | alveolar | | | | pAMP10 |
| | | rhabdomyosarco | | | | |
| | | ma | | | | |
| L0524 | NCI_CGAP_Lil | liver | | | | pAMP 10 |
| L0526 | NCI_CGAP_Pr12 | metastatic | | | | pAMP 10 |
| | | prostate bone | | | | |
| | | lesion | | | | |
| L0527 | NCI CGAP Ov2 | ovary | | | | pAMP 10 |
| L0581 | Stratagene liver | | liver | | | pBluescript |
| | (#937224) | | | | | SK |
| L0588 | Stratagene endothelial | | | | | pBluescript |
| | cell 937223 | | | | | SK- |
| L0591 | Stratagene HeLa cell s3 | | | | | pBluescript |
| | 937216 | | | | | SK- |
| L0592 | Stratagene hNT neuron | | | | | pBluescript |
| | (#937233) | | | | | SK- |
| L0593 | Stratagene | | | | | pBluescript |
| | neuroepithelium | | | | | SK- |
| | (#937231) | | | | | |
| L0598 | Morton Fetal Cochlea | cochlea | ear | | | pBluescript |
| | | | | | | SK- |
| L0599 | Stratagene lung | | lung | | | pBluescript |
| | (#937210) | | | | | SK- |
| L0603 | Stratagene placenta | | placenta | | | pBluescript |
| | (#937225) | | | | | SK- |
| L0646 | NCI_CGAP_Co14 | moderately- | colon | | | pCMV- |
| | | differentiated | | | | SPORT6 |
| | | adenocarcinoma | | | | |
| L0649 | NCI_CGAP_GU1 | 2 pooled high- | genitourinary | | | pCMV- |
| | | grade transitional | tract | | | SPORT6 |
| | | cell tumors | | | | |
| L0656 | NCI_CGAP_Ov38 | normal | ovary | | | pCMV- |
| | | epithelium | | | | SPORT6 |
| L0663 | NCI_CGAP_Ut2 | moderately- | uterus | | | pCMV- |
| | | differentiated | | | | SPORT6 |
| | | endometrial | | | | |
| | | adenocarcino | | | | |
| L0666 | NCI_CGAP_Ut1 | well- | uterus | | | pCMV- |
| | | differentiated | | | | SPORT6 |
| | | endometrial | | | | |
| | | adenocarcinoma, | | | | |
| | | 7 | | | | |
| L0686 | Stanley Frontal SN pool | frontal lobe (see | brain | | | pCR2.1- |
| | 2 | description) | | | | TOPO |
| | | | | | | (Invitrogen) |
| L0717 | Gessler Wilms tumor | | | | | pSPORT1 |
| L0731 | Soares_pregnant_uterus | | uterus | | | pT7T3-Pac |
| | NbHPU | | | | | |
| L0740 | Soares melanocyte | melanocyte | | | | pT7T3D |
| | 2NbHM | | | | | (Pharmacia) |
| | | | | | | with a |
| | | | | | | modified |
| | | | | | | polylinker |
| L0741 | Soares adult brain | | brain | | | pT7T3D |
| | N2b4HB55Y | | | | | (Pharmacia) |
| | | | | | | with a |
| | | | | | | modified |
| | | | | | | polylinker |
| L0743 | Soares breast 2NbHBst | | breast | | | pT7T3D |
| | | | | | | (Pharmacia) |
| | | | | | | with a |
| | | | | | | modified |
| | | | | | | polylinker |
| L0744 | Soares breast 3NbHBst | | breast | | | pT7T3D |
| | | | | | | (Pharmacia) |
| | | | | | | with a |
| | | | | | | modified |
| | | | | | | polylinker |
| L0746 | Soares retina N2b5HR | retina | eye | | | pT7T3D |
| | | | | | | (Pharmacia) |
| | | | | | | with a |
| | | | | | | modified |
| | | | | | | polylinker |
| L0747 | Soares_fetal_heart_Nb | | heart | | | pT7T3D |
| | HH19W | | | | | (Pharmacia) |
| | | | | | | with a |
| | | | | | | modified |
| | | | | | | polylinker |
| L0748 | Soares fetal liver spleen | | Liver and | | | pT7T3D |
| | 1NFLS | | Spleen | | | (Pharmacia) |
| | | | | | | with a |
| | | | | | | modified |
| | | | | | | polylinker |
| L0749 | Soares_fetal_liver_sp | | Liver and | | | pT7T3D |
| | leen_1NFLS_S1 | | Spleen | | | (Pharmacia) |
| | | | | | | with a |
| | | | | | | modified |
| | | | | | | polylinker |
| L0750 | Soares_fetal_lung_NbH | | lung | | | pT7T3D |
| | L19W | | | | | (Pharmacia) |
| | | | | | | with a |
| | | | | | | modified |
| | | | | | | polylinker |
| L0751 | Soares ovary tumor | ovarian tumor | ovary | | | pT7T3D |
| | NbHOT | | | | | (Pharmacia) |
| | | | | | | with a |
| | | | | | | modified |
| | | | | | | polylinker |
| L0752 | Soares_parathyroid_tu | parathyroid tumor | parathyroid | | | pT7T3D |
| | mor_NbHPA | | gland | | | (Pharmacia) |
| | | | | | | with a |
| | | | | | | modified |
| | | | | | | polylinker |
| L0753 | Soares_pineal_gland_N | | pineal gland | | | pT7T3D |
| | 3HPG | | | | | (Pharmacia) |
| | | | | | | with a |
| | | | | | | modified |
| | | | | | | polylinker |
| L0754 | Soares placenta Nb2HP | | placenta | | | pT7T3D |
| | | | | | | (Pharmacia) |
| | | | | | | with a |
| | | | | | | modified |
| | | | | | | polylinker |
| L0756 | Soares_multiple_scleros | multiple sclerosis | | | | pT7T3D |
| | is_2NbHMSP | lesions | | | | (Pharmacia) |
| | | | | | | with a |
| | | | | | | modified |
| | | | | | | polylinker |
| | | | | | | V TYPE |
| L0757 | Soares_senescent_fibro | senescent | | | | pT7T3D |
| | blasts_NbHSF | fibroblast | | | | (Pharmacia) |
| | | | | | | with a |
| | | | | | | modified |
| | | | | | | polylinker |
| | | | | | | V TYPE |
| L0758 | Soares_testis_NHT | | | | | pT7T3D- |
| | | | | | | Pac |
| | | | | | | (Pharmacia) |
| | | | | | | with a |
| | | | | | | modified |
| | | | | | | polylinker |
| L0759 | Soares_total_fetus_Nb2 | | | | | pT7T3D- |
| | HF8_9w | | | | | Pac |
| | | | | | | (Pharmacia) |
| | | | | | | with a |
| | | | | | | modified |
| | | | | | | polylinker |
| L0762 | NCI_CGAP_Br1.1 | breast | | | | pT7T3D- |
| | | | | | | Pac |
| | | | | | | (Pharmacia) |
| | | | | | | with a |
| | | | | | | modified |
| | | | | | | polylinker |
| L0764 | NCI_CGAP_Co3 | colon | | | | pT7T3D- |
| | | | | | | Pac |
| | | | | | | (Pharmacia) |
| | | | | | | with a |
| | | | | | | modified |
| | | | | | | polylinker |
| L0766 | NCI_CGAP_GCB1 | germinal center B | | | | pT7T3D- |
| | | cell | | | | Pac |
| | | | | | | (Pharmacia) |
| | | | | | | with a |
| | | | | | | modified |
| | | | | | | polylinker |
| L0769 | NCI_CGAP_Brn 25 | anaplastic | brain | | | pT7T3D- |
| | | oligodendrogliom | | | | Pac |
| | | a | | | | (Pharmacia) |
| | | | | | | with a |
| | | | | | | modified |
| | | | | | | polylinker |
| L0770 | NCI_CGAP_Brn23 | glioblastoma | brain | | | pT7T3D- |
| | | (pooled) | | | | Pac |
| | | | | | | (Pharmacia) |
| | | | | | | with a |
| | | | | | | modified |
| | | | | | | polylinker |
| L0771 | NCI_CGAP_Co8 | adenocarcinoma | colon | | | pT7T3D- |
| | | | | | | Pac |
| | | | | | | (Pharmacia) |
| | | | | | | with a |
| | | | | | | modified |
| | | | | | | polylinker |
| L0774 | NCI_CGAP_Kid3 | | kidney | | | pT7T3D- |
| | | | | | | Pac |
| | | | | | | (Pharmacia) |
| | | | | | | with a |
| | | | | | | modified |
| | | | | | | polylinker |
| L0775 | NCI_CGAP_Kid5 | 2 pooled tumors | kidney | | | pT7T3D- |
| | | (clear cell type) | | | | Pac |
| | | | | | | (Pharmacia) |
| | | | | | | with a |
| | | | | | | modified |
| | | | | | | polylinker |
| L0776 | NCI_CGAP_Lu5 | carcinoid | lung | | | pT7T3D- |
| | | | | | | Pac |
| | | | | | | (Pharmacia) |
| | | | | | | with a |
| | | | | | | modified |
| | | | | | | polylinker |
| L0777 | Soares_NhHMPu_S1 | Pooled human | mixed (see | | | pT7T3D- |
| | | melanocyte, fetal | below) | | | Pac |
| | | heart, and | | | | (Pharmacia) |
| | | pregnant | | | | with a |
| | | | | | | modified |
| | | | | | | polylinker |
| L0779 | Soares_NFL_T_GBC_S | | pooled | | | pT7T3D- |
| | 1 | | | | | Pac |
| | | | | | | (Pharmacia) |
| | | | | | | with a |
| | | | | | | modified |
| | | | | | | polylinker |
| L0780 | Soares_NSF_F8_9W_O | | pooled | | | pT7T3D- |
| | T_PA_P_S1 | | | | | Pac |
| | | | | | | (Pharmacia) |
| | | | | | | with a |
| | | | | | | modified |
| | | | | | | polylinker |
| L0782 | NCI_CGAP_Pr21 | normal prostate | prostate | | | pT7T3D- |
| | | | | | | Pac |
| | | | | | | (Pharmacia) |
| | | | | | | with a |
| | | | | | | modified |
| | | | | | | polylinker |
| L0783 | NCI_CGAP_Pr22 | normal prostate | prostate | | | pT7T3D- |
| | | | | | | Pac |
| | | | | | | (Pharmacia) |
| | | | | | | with a |
| | | | | | | modified |
| | | | | | | polylinker |
| L0786 | Soares_NbHFB | | whole brain | | | pT7T3D- |
| | | | | | | Pac |
| | | | | | | (Pharmacia) |
| | | | | | | with a |
| | | | | | | modified |
| | | | | | | polylinker |
| L0792 | NCI_CGAP_Sub6 | | | | | pT7T3D- |
| | | | | | | Pac |
| | | | | | | (Pharmacia) |
| | | | | | | with a |
| | | | | | | modified |
| | | | | | | polylinker |
| L0794 | NCI_CGAP_GC6 | pooled germ cell | | | | pT7T3D- |
| | | tumors | | | | Pac |
| | | | | | | (Pharmacia) |
| | | | | | | with a |
| | | | | | | modified |
| | | | | | | polylinker |
| L0803 | NCI_CGAP_Kid12 | | kidney | | | pT7T3D- |
| | | | | | | Pac |
| | | | | | | (Pharmacia) |
| | | | | | | with a |
| | | | | | | modified |
| | | | | | | polylinker |
| L0804 | NCI_CGAP_Kid12 | 2 pooled tumors | kidney | | | pT7T3D- |
| | | (clear cell type) | | | | Pac |
| | | | | | | (Pharmacia) |
| | | | | | | with a |
| | | | | | | modified |
| | | | | | | polylinker |

[0097] TABLE 5

| OMIM | |
|---|---|
| Reference | Description |
| 138079 | Hyperinsulinism, familial, 602485 |
| 138079 | MODY, type 2, 125851 |
| 139191 | Growth hormone deficient dwarfism |
| 142959 | Hand-foot-uterus syndrome, 140000 |
| 153880 | Macular dystrophy, dominant cystoid |
| 180104 | Retinitis pigmentosa-9 |
| 600994 | Deafness, autosomal dominant 5 |
| 601649 | Blepharophimosis, epicanthus inversus, and ptosis, type 2 |

[0098] Polynucleotide and Polypeptide Variants

[0099] The present invention is also directed to variants of the ovarian and/or breast associated polynucleotide sequence disclosed in SEQ ID NO:X or the complementary strand thereto, nucleotide sequences encoding the polypeptide of SEQ ID NO:Y, the nucleotide sequence of SEQ ID NO:X encoding the polypeptide sequence as defined in column 6 of Table 1A, nucleotide sequences encoding the polypeptide as defined in column 6 of Table 1A, the nucleotide sequence as defined in columns 8 and 9 of Table 2, nucleotide sequences encoding the polypeptide encoded by the nucleotide sequence as defined in columns 8 and 9 of Table 2, the nucleotide sequence as defined in column 6 of Table 1B, nucleotide sequences encoding the polypeptide encoded by the nucleotide sequence as defined in column 6 of Table 1B, the cDNA sequence contained in Clone ID NO:Z, and/or nucleotide sequences encoding a polypeptide encoded by the cDNA sequence contained in Clone ID NO:Z.

[0100] The present invention also encompasses variants of the polypeptide sequence disclosed in SEQ ID NO:Y, a polypeptide sequence as defined in column 6 of Table 1A, a polypeptide sequence encoded by the polynucleotide sequence in SEQ ID NO:X, a polypeptide sequence encoded by the nucleotide sequence as defined in columns 8 and 9 of Table 2, a polypeptide sequence encoded by the nucleotide sequence as defined in column 6 of Table 1B, a polypeptide sequence encoded by the complement of the polynucleotide sequence in SEQ ID NO:X, and/or a polypeptide sequence encoded by the cDNA sequence contained in Clone ID NO:Z.

[0101] “Variant” refers to a polynucleotide or polypeptide differing from the polynucleotide or polypeptide of the present invention, but retaining essential properties thereof. Generally, variants are overall closely similar, and, in many regions, identical to the polynucleotide or polypeptide of the present invention.

[0102] Thus, one aspect of the invention provides an isolated nucleic acid molecule comprising, or alternatively consisting of, a polynucleotide having a nucleotide sequence selected from the group consisting of: (a) a nucleotide sequence described in SEQ ID NO:X or contained in the cDNA sequence of Clone ID NO:Z; (b) a nucleotide sequence in SEQ ID NO:X or the cDNA in Clone ID NO:Z which encodes a mature ovarian and/or breast associated polypeptide; (c) a nucleotide sequence in SEQ ID NO:X or the cDNA sequence of Clone ID NO:Z, which encodes a biologically active fragment of an ovarian and/or breast associated polypeptide; (d) a nucleotide sequence in SEQ ID NO:X or the cDNA sequence of Clone ID NO:Z, which encodes an antigenic fragment of an ovarian and/or breast associated polypeptide; (e) a nucleotide sequence encoding an ovarian and/or breast associated polypeptide having the complete amino acid sequence of SEQ ID NO:Y or the complete amino acid sequence encoded by the cDNA in Clone ID NO:Z; (f) a nucleotide sequence encoding a mature ovarian and/or breast associated polypeptide of the amino acid sequence of SEQ ID NO:Y or the amino acid sequence encoded by the cDNA in Clone ID NO:Z; (g) a nucleotide sequence encoding a biologically active fragment of an ovarian and/or breast associated polypeptide having the complete amino acid sequence of SEQ ID NO:Y or the complete amino acid sequence encoded by the cDNA in Clone ID NO:Z; (h) a nucleotide sequence encoding an antigenic fragment of an ovarian and/or breast associated polypeptide having the complete amino acid sequence of SEQ ID NO:Y or the complete amino acid sequence encoded by the cDNA in Clone ID NO:Z; and (i) a nucleotide sequence complementary to any of the nucleotide sequences in (a), (b), (c), (d), (e), (f), (g), or (h), above.

[0103] The present invention is also directed to nucleic acid molecules which comprise, or alternatively consist of, a nucleotide sequence which is at least 80%, 85%, 90%, 95%, 96%, 97%, 98%, 99% or 100%, identical to, for example, any of the nucleotide sequences in (a), (b), (c), (d), (e), (f), (g), (h), or (i) above, the nucleotide coding sequence in SEQ ID NO:X or the complementary strand thereto, the nucleotide coding sequence of the cDNA contained in Clone ID NO:Z or the complementary strand thereto, a nucleotide sequence encoding the polypeptide of SEQ ID NO:Y, a nucleotide sequence encoding a polypeptide sequence encoded by the nucleotide sequence in SEQ ID NO:X, a polypeptide sequence encoded by the complement of the polynucleotide sequence in SEQ ID NO:X, a nucleotide sequence encoding the polypeptide encoded by the cDNA contained in Clone ID NO:Z, the nucleotide coding sequence in SEQ ID NO:X as defined in columns 8 and 9 of Table 2 or the complementary strand thereto, a nucleotide sequence encoding the polypeptide encoded by the nucleotide sequence in SEQ ID NO:X as defined in columns 8 and 9 of Table 2 or the complementary strand thereto, the nucleotide coding sequence in SEQ ID NO:B as defined in column 6 of Table 1B or the complementary strand thereto, a nucleotide sequence encoding the polypeptide encoded by the nucleotide sequence in SEQ ID NO:B as defined in column 6 of Table 1B or the complementary strand thereto, the nucleotide sequence in SEQ ID NO:X encoding the polypeptide sequence as defined in column 6 of Table 1A or the complementary strand thereto, nucleotide sequences encoding a polypeptide as defined in column 6 of Table 1A or the complementary strand thereto, and/or polynucleotide fragments of any of these nucleic acid molecules (e.g., those fragments described herein). Polynucleotides which hybridize to the complement of these nucleic acid molecules under stringent hybridization conditions or alternatively, under lower stringency conditions, are also encompassed by the invention, as are polypeptides encoded by these polynucleotides and nucleic acids.

[0104] In a preferred embodiment, the invention encompasses nucleic acid molecules which comprise, or alternatively, consist of a polynucleotide which hybridizes under stringent hybridization conditions, or alternatively, under lower stringency conditions, to a polynucleotide in (a), (b), (c), (d), (e), (f), (g), (h), or (i) above, as are polypeptides encoded by these polynucleotides. In another preferred embodiment, polynucleotides which hybridize to the complement of these nucleic acid molecules under stringent hybridization conditions or alternatively, under lower stringency conditions, are also encompassed by the invention, as are polypeptides encoded by these polynucleotides.

[0105] In another embodiment, the invention provides a purified protein comprising, or alternatively consisting of, a polypeptide having an amino acid sequence selected from the group consisting of: (a) the complete amino acid sequence of SEQ ID NO:Y or the complete amino acid sequence encoded by the cDNA in Clone ID NO:Z; (b) the amino acid sequence of a mature ovarian and/or breast associated polypeptide having the amino acid sequence of SEQ ID NO:Y or the amino acid sequence encoded by the cDNA in Clone ID NO:Z; (c) the amino acid sequence of a biologically active fragment of an ovarian and/or breast associated polypeptide having the complete amino acid sequence of SEQ ID NO:Y or the complete amino acid sequence encoded by the cDNA in Clone ID NO:Z; and (d) the amino acid sequence of an antigenic fragment of an ovarian and/or breast associated polypeptide having the complete amino acid sequence of SEQ ID NO:Y or the complete amino acid sequence encoded by the cDNA in Clone ID NO:Z.

[0106] The present invention is also directed to proteins which comprise, or alternatively consist of, an amino acid sequence which is at least 80%, 85%, 90%, 95%, 96%, 97%, 98%, 99% or 100%, identical to, for example, any of the amino acid sequences in (a), (b), (c), or (d), above, the amino acid sequence shown in SEQ ID NO:Y, the amino acid sequence encoded by the cDNA contained in Clone ID NO:Z, the amino acid sequence of the polypeptide encoded by the nucleotide sequence in SEQ ID NO:X as defined in columns 8 and 9 of Table 2, the amino acid sequence of the polypeptide encoded by the nucleotide sequence in —SEQ ID NO:B as defined in column 6 of Table 1B, the amino acid sequence as defined in column 6 of Table 1A, an amino acid sequence encoded by the nucleotide sequence in SEQ ID NO:X, and an amino acid sequence encoded by the complement of the polynucleotide sequence in SEQ ID NO:X. Fragments of these polypeptides are also provided (e.g., those fragments described herein). Further proteins encoded by polynucleotides which hybridize to the complement of the nucleic acid molecules encoding these amino acid sequences under stringent hybridization conditions or alternatively, under lower stringency conditions, are also encompassed by the invention, as are the polynucleotides encoding these proteins.

[0107] By a nucleic acid having a nucleotide sequence at least, for example, 95% “identical” to a reference nucleotide sequence of the present invention, it is intended that the nucleotide sequence of the nucleic acid is identical to the reference sequence except that the nucleotide sequence may include up to five point mutations per each 100 nucleotides of the reference nucleotide sequence encoding the polypeptide. In other words, to obtain a nucleic acid having a nucleotide sequence at least 95% identical to a reference nucleotide sequence, up to 5% of the nucleotides in the reference sequence may be deleted or substituted with another nucleotide, or a number of nucleotides up to 5% of the total nucleotides in the reference sequence may be inserted into the reference sequence. The query sequence may be an entire sequence referred to in Table 1A or 2 as the ORF (open reading frame), or any fragment specified, as described herein.

[0108] As a practical matter, whether any particular nucleic acid molecule or polypeptide is at least 80%, 85%, 90%, 95%, 96%, 97%, 98% or 99% identical to a nucleotide sequence of the present invention can be determined conventionally using known computer programs. A preferred method for determining the best overall match between a query sequence (a sequence of the present invention) and a subject sequence, also referred to as a global sequence alignment, can be determined using the FASTDB computer program based on the algorithm of Brutlag et al. (Comp. App. Biosci. 6:237-245 (1990)). In a sequence alignment the query and subject sequences are both DNA sequences. An RNA sequence can be compared by converting U's to T's. The result of said global sequence alignment is expressed as percent identity. Preferred parameters used in a FASTDB alignment of DNA sequences to calculate percent identity are: Matrix=Unitary, k-tuple=4, Mismatch Penalty=1, Joining Penalty=30, Randomization Group Length=0, Cutoff Score=1, Gap Penalty=5, Gap Size Penalty 0.05, Window Size=500 or the length of the subject nucleotide sequence, whichever is shorter.

[0109] If the subject sequence is shorter than the query sequence because of 5′ or 3′ deletions, not because of internal deletions, a manual correction must be made to the results. This is because the FASTDB program does not account for 5′ and 3′ truncations of the subject sequence when calculating percent identity. For subject sequences truncated at the 5′ or 3′ ends, relative to the query sequence, the percent identity is corrected by calculating the number of bases of the query sequence that are 5′ and 3′ of the subject sequence, which are not matched/aligned, as a percent of the total bases of the query sequence. Whether a nucleotide is matched/aligned is determined by results of the FASTDB sequence alignment. This percentage is then subtracted from the percent identity, calculated by the above FASTDB program using the specified parameters, to arrive at a final percent identity score. This corrected score is what is used for the purposes of the present invention. Only bases outside the 5′ and 3′ bases of the subject sequence, as displayed by the FASTDB alignment, which are not matched/aligned with the query sequence, are calculated for the purposes of manually adjusting the percent identity score.

[0110] For example, a 90 base subject sequence is aligned to a 100 base query sequence to determine percent identity. The deletions occur at the 5′ end of the subject sequence and therefore, the FASTDB alignment does not show a matched/alignment of the first 10 bases at 5′ end. The 10 unpaired bases represent 10% of the sequence (number of bases at the 5′ and 3′ ends not matched/total number of bases in the query sequence) so 10% is subtracted from the percent identity score calculated by the FASTDB program. If the remaining 90 bases were perfectly matched the final percent identity would be 90%. In another example, a 90 base subject sequence is compared with a 100 base query sequence. This time the deletions are internal deletions so that there are no bases on the 5′ or 3′ of the subject sequence which are not matched/aligned with the query. In this case the percent identity calculated by FASTDB is not manually corrected. Once again, only bases 5′ and 3′ of the subject sequence which are not matched/aligned with the query sequence are manually corrected for. No other manual corrections are to made for the purposes of the present invention.

[0111] By a polypeptide having an amino acid sequence at least, for example, 95% “identical” to a query amino acid sequence of the present invention, it is intended that the amino acid sequence of the subject polypeptide is identical to the query sequence except that the subject polypeptide sequence may include up to five amino acid alterations per each 100 amino acids of the query amino acid sequence. In other words, to obtain a polypeptide having an amino acid sequence at least 95% identical to a query amino acid sequence, up to 5% of the amino acid residues in the subject sequence may be inserted, deleted, (indels) or substituted with another amino acid. These alterations of the reference sequence may occur at the amino or carboxy terminal positions of the reference amino acid sequence or anywhere between those terminal positions, interspersed either individually among residues in the reference sequence or in one or more contiguous groups within the reference sequence.

[0112] As a practical matter, whether any particular polypeptide is at least 80%, 85%, 90%, 95%, 96%, 97%, 98% or 99% identical to, for instance, the amino acid sequence of a polypeptide referred to in Table 1A (e.g., an amino acid sequence identified in columns 5 or 6) or Table 2 (e.g., the amino acid sequence of the polypeptide encoded by the polynucleotide sequence defined in columns 8 and 9 of Table 2) or a fragment thereof, the amino acid sequence of the polypeptide encoded by the polynucleotide sequence in SEQ ID NO:B as defined in column 6 of Table 1B or a fragment thereof, the amino acid sequence of the polypeptide encoded by the nucleotide sequence in SEQ ID NO:X or a fragment thereof, or an amino acid sequence of the polypeptide encoded by cDNA contained in Clone ID NO:Z, or a fragment thereof, can be determined conventionally using known computer programs. A preferred method for determining the best overall match between a query sequence (a sequence of the present invention) and a subject sequence, also referred to as a global sequence alignment, can be determined using the FASTDB computer program based on the algorithm of Brutlag et al. (Comp. App. Biosci. 6:237-245 (1990)). In a sequence alignment the query and subject sequences are either both nucleotide sequences or both amino acid sequences. The result of said global sequence alignment is expressed as percent identity. Preferred parameters used in a FASTDB amino acid alignment are: Matrix—PAM 0, k-tuple=2, Mismatch Penalty=1, Joining Penalty-20, Randomization Group Length=0, Cutoff Score=1, Window Size=sequence length, Gap Penalty=5, Gap Size Penalty=0.05, Window Size=500 or the length of the subject amino acid sequence, whichever is shorter.

[0113] If the subject sequence is shorter than the query sequence due to N- or C-terminal deletions, not because of internal deletions, a manual correction must be made to the results. This is because the FASTDB program does not account for N- and C-terminal truncations of the subject sequence when calculating global percent identity. For subject sequences truncated at the N- and C-termini, relative to the query sequence, the percent identity is corrected by calculating the number of residues of the query sequence that are N- and C-terminal of the subject sequence, which are not matched/aligned with a corresponding subject residue, as a percent of the total bases of the query sequence. Whether a residue is matched/aligned is determined by results of the FASTDB sequence alignment. This percentage is then subtracted from the percent identity, calculated by the above FASTDB program using the specified parameters, to arrive at a final percent identity score. This final percent identity score is what is used for the purposes of the present invention. Only residues to the N- and C-termini of the subject sequence, which are not matched/aligned with the query sequence, are considered for the purposes of manually adjusting the percent identity score. That is, only query residue positions outside the farthest N- and C-terminal residues of the subject sequence.

[0114] For example, a 90 amino acid residue subject sequence is aligned with a 100 residue query sequence to determine percent identity. The deletion occurs at the N-terminus of the subject sequence and therefore, the FASTDB alignment does not show a matching/alignment of the first 10 residues at the N-terminus. The 10 unpaired residues represent 10% of the sequence (number of residues at the N- and C-termini not matched/total number of residues in the query sequence) so 10% is subtracted from the percent identity score calculated by the FASTDB program. If the remaining 90 residues were perfectly matched the final percent identity would be 90%. In another example, a 90 residue subject sequence is compared with a 100 residue query sequence. This time the deletions are internal deletions so there are no residues at the N- or C-termini of the subject sequence which are not matched/aligned with the query. In this case the percent identity calculated by FASTDB is not manually corrected. Once again, only residue positions outside the N- and C-terminal ends of the subject sequence, as displayed in the FASTDB alignment, which are not matched/aligned with the query sequence are manually corrected for. No other manual corrections are to be made for the purposes of the present invention.

[0115] The polynucleotide variants of the invention may contain alterations in the coding regions, non-coding regions, or both. Especially preferred are polynucleotide variants containing alterations which produce silent substitutions, additions, or deletions, but do not alter the properties or activities of the encoded polypeptide. Nucleotide variants produced by silent substitutions due to the degeneracy of the genetic code are preferred. Moreover, polypeptide variants in which less than 50, less than 40, less than 30, less than 20, less than 10, or 5-50, 5-25, 5-10, 1-5, or 1-2 amino acids are substituted, deleted, or added in any combination are also preferred. Polynucleotide variants can be produced for a variety of reasons, e.g., to optimize codon expression for a particular host (change codons in the human mRNA to those preferred by a bacterial host such as E. coli).

[0116] Naturally occurring variants are called “allelic variants,” and refer to one of several alternate forms of a gene occupying a given locus on a chromosome of an organism. (Genes II, Lewin, B., ed., John Wiley & Sons, New York (1985).) These allelic variants can vary at either the polynucleotide and/or polypeptide level and are included in the present invention. Alternatively, non-naturally occurring variants may be produced by mutagenesis techniques or by direct synthesis.

[0117] Using known methods of protein engineering and recombinant DNA technology, variants may be generated to improve or alter the characteristics of the polypeptides of the present invention. For instance, one or more amino acids can be deleted from the N-terminus or C-terminus of the polypeptides of the present invention without substantial loss of biological function. As an example, the authors of Ron et al., J. Biol. Chem. 268: 2984-2988 (1993), reported variant KGF proteins having heparin binding activity even after deleting 3, 8, or 27 amino-terminal amino acid residues. Similarly, Interferon gamma exhibited up to ten times higher activity after deleting 8-10 amino acid residues from the carboxy terminus of this protein. (Dobeli et al., J. Biotechnology 7:199-216 (1988).)

[0118] Moreover, ample evidence demonstrates that variants often retain a biological activity similar to that of the naturally occurring protein. For example, Gayle and coworkers (J. Biol. Chem. 268:22105-22111 (1993)) conducted extensive mutational analysis of human cytokine IL-1a. They used random mutagenesis to generate over 3,500 individual IL-1a mutants that averaged 2.5 amino acid changes per variant over the entire length of the molecule. Multiple mutations were examined at every possible amino acid position. The investigators found that “[m]ost of the molecule could be altered with little effect on either [binding or biological activity].” In fact, only 23 unique amino acid sequences, out of more than 3,500 nucleotide sequences examined, produced a protein that significantly differed in activity from wild-type.

[0119] Furthermore, even if deleting one or more amino acids from the N-terminus or C-terminus of a polypeptide results in modification or loss of one or more biological functions, other biological activities may still be retained. For example, the ability of a deletion variant to induce and/or to bind antibodies which recognize the secreted form will likely be retained when less than the majority of the residues of the secreted form are removed from the N-terminus or C-terminus. Whether a particular polypeptide lacking N- or C-terminal residues of a protein retains such immunogenic activities can readily be determined by routine methods described herein and otherwise known in the art.

[0120] Thus, the invention further includes polypeptide variants which show a functional activity (e.g., biological activity) of the polypeptides of the invention. Such variants include deletions, insertions, inversions, repeats, and substitutions selected according to general rules known in the art so as have little effect on activity.

[0121] The present application is directed to nucleic acid molecules at least 80%, 85%, 90%, 95%, 96%, 97%, 98%, 99% or 100% identical to the nucleic acid sequences disclosed herein, (e.g., encoding a polypeptide having the amino acid sequence of an N and/or C terminal deletion), irrespective of whether they encode a polypeptide having functional activity. This is because even where a particular nucleic acid molecule does not encode a polypeptide having functional activity, one of skill in the art would still know how to use the nucleic acid molecule, for instance, as a hybridization probe or a polymerase chain reaction (PCR) primer. Uses of the nucleic acid molecules of the present invention that do not encode a polypeptide having functional activity include, inter alia, (1) isolating a gene or allelic or splice variants thereof in a cDNA library; (2) in situ hybridization (e.g., “FISH”) to metaphase chromosomal spreads to provide precise chromosomal location of the gene, as described in Verma et al., Human Chromosomes: A Manual of Basic Techniques, Pergamon Press, New York (1988); (3) Northern Blot analysis for detecting mRNA expression in specific tissues (e.g., normal ovarian and/or breast tissues or diseased ovarian and/or breast tissues); and (4) in situ hybridization (e.g., histochemistry) for detecting mRNA expression in specific tissues (e.g., normal ovarian and/or breast tissues or diseased ovarian and/or breast tissues).

[0122] Preferred, however, are nucleic acid molecules having sequences at least 80%, 85%, 90%, 95%, 96%, 97%, 98%, 99% or 100% identical to the nucleic acid sequences disclosed herein, which do; in fact, encode a polypeptide having functional activity. By a polypeptide having “functional activity” is meant, a polypeptide capable of displaying one or more known functional activities associated with a full-length (complete) protein of the invention. Such functional activities include, but are not limited to, biological activity, antigenicity [ability to bind (or compete with a polypeptide of the invention for binding) to an anti-polypeptide of the invention antibody], immunogenicity (ability to generate antibody which binds to a specific polypeptide of the invention), ability to form multimers with polypeptides of the invention, and ability to bind to a receptor or ligand for a polypeptide of the invention.

[0123] The functional activity of the polypeptides, and fragments, variants and derivatives of the invention, can be assayed by various methods.

[0124] For example, in one embodiment where one is assaying for the ability to bind or compete with full-length polypeptide of the present invention for binding to an anti-polypeptide of the invention antibody, various immunoassays known in the art can be used, including but not limited to, competitive and non-competitive assay systems using techniques such as radioimmunoassays, ELISA (enzyme linked immunosorbent assay), “sandwich” immunoassays, immunoradiometric assays, gel diffusion precipitation reactions, immunodiffusion assays, in situ immunoassays (using colloidal gold, enzyme or radioisotope labels, for example), western blots, precipitation reactions, agglutination assays (e.g., gel agglutination assays, hemagglutination assays), complement fixation assays, immunofluorescence assays, protein A assays, and immunoelectrophoresis assays, etc. In one embodiment, antibody binding is detected by detecting a label on the primary antibody. In another embodiment, the primary antibody is detected by detecting binding of a secondary antibody or reagent to the primary antibody. In a further embodiment, the secondary antibody is labeled. Many means are known in the art for detecting binding in an immunoassay and are within the scope of the present invention.

[0125] In another embodiment, where a ligand is identified, or the ability of a polypeptide fragment, variant or derivative of the invention to multimerize is being evaluated, binding can be assayed, e.g., by means well-known in the art, such as, for example, reducing and non-reducing gel chromatography, protein affinity chromatography, and affinity blotting. See generally, Phizicky et al., Microbiol. Rev. 59:94-123 (1995). In another embodiment, the ability of physiological correlates of a polypeptide of the present invention to bind to a substrate(s) of the polypeptide of the invention can be routinely assayed using techniques known in the art.

[0126] In addition, assays described herein (see Examples) and otherwise known in the art may routinely be applied to measure the ability of polypeptides of the present invention and fragments, variants and derivatives thereof to elicit polypeptide related biological activity (either in vitro or in vivo). Other methods will be known to the skilled artisan and are within the scope of the invention.

[0127] Of course, due to the degeneracy of the genetic code, one of ordinary skill in the art will immediately recognize that a large number of the nucleic acid molecules having a sequence at least 80%, 85%, 90%, 95%, 96%, 97%, 98%, 99%, or 100% identical to, for example, the nucleic acid sequence of the cDNA contained in Clone ID NO:Z, a nucleic acid sequence referred to in Table 1A (e.g., SEQ ID NO:X), a nucleic acid sequence disclosed in Table 2 (e.g., the nucleic acid sequence delineated in columns 8 and 9) or fragments thereof, will encode polypeptides “having functional activity.” In fact, since degenerate variants of any of these nucleotide sequences all encode the same polypeptide, in many instances, this will be clear to the skilled artisan even without performing the above described comparison assay. It will be further recognized in the art that, for such nucleic acid molecules that are not degenerate variants, a reasonable number will also encode a polypeptide having functional activity. This is because the skilled artisan is fully aware of amino acid substitutions that are either less likely or not likely to significantly effect protein function (e.g., replacing one aliphatic amino acid with a second aliphatic amino acid), as further described below.

[0128] For example, guidance concerning how to make phenotypically silent amino acid substitutions is provided in Bowie et al., “Deciphering the Message in Protein Sequences: Tolerance to Amino Acid Substitutions,” Science 247:1306-1310 (1990), wherein the authors indicate that there are two main strategies for studying the tolerance of an amino acid sequence to change.

[0129] The first strategy exploits the tolerance of amino acid substitutions by natural selection during the process of evolution. By comparing amino acid sequences in different species, conserved amino acids can be identified. These conserved amino acids are likely important for protein function. In contrast, the amino acid positions where substitutions have been tolerated by natural selection indicates that these positions are not critical for protein function. Thus, positions tolerating amino acid substitution could be modified while still maintaining biological activity of the protein.

[0130] The second strategy uses genetic engineering to introduce amino acid changes at specific positions of a cloned gene to identify regions critical for protein function. For example, site directed mutagenesis or alanine-scanning mutagenesis (introduction of single alanine mutations at every residue in the molecule) can be used. See Cunningham et al., Science 244:1081-1085 (1989). The resulting mutant molecules can then be tested for biological activity.

[0131] As the authors state, these two strategies have revealed that proteins are surprisingly tolerant of amino acid substitutions. The authors further indicate which amino acid changes are likely to be permissive at certain amino acid positions in the protein. For example, most buried (within the tertiary structure of the protein) amino acid residues require nonpolar side chains, whereas few features of surface side chains are generally conserved. Moreover, tolerated conservative amino acid substitutions involve replacement of the aliphatic or hydrophobic amino acids Ala, Val, Leu and Ile; replacement of the hydroxyl residues Ser and Thr; replacement of the acidic residues Asp and Glu; replacement of the amide residues Asn and Gln, replacement of the basic residues Lys, Arg, and His; replacement of the aromatic residues Phe, Tyr, and Trp, and replacement of the small-sized amino acids Ala, Ser, Thr, Met, and Gly. Besides conservative amino acid substitutions, variants of the present invention include (i) substitutions with one or more of the non-conserved amino acid residues, where the substituted amino acid residues may or may not be one encoded by the genetic code, or (ii) substitutions with one or more of the amino acid residues having a substituent group, or (iii) fusion of the mature polypeptide with another compound, such as a compound to increase the stability and/or solubility of the polypeptide (for example, polyethylene glycol), or (iv) fusion of the polypeptide with additional amino acids, such as, for example, an IgG Fc fusion region peptide, serum albumin (preferably human serum albumin) or a fragment or variant thereof, or leader or secretory sequence, or a sequence facilitating purification. Such variant polypeptides are deemed to be within the scope of those skilled in the art from the teachings herein.

[0132] For example, polypeptide variants containing amino acid substitutions of charged amino acids with other charged or neutral amino acids may produce proteins with improved characteristics, such as less aggregation. Aggregation of pharmaceutical formulations both reduces activity and increases clearance due to the aggregate's immunogenic activity. See Pinckard et al., Clin. Exp. Immunol. 2:331-340 (1967); Robbins et al., Diabetes 36: 838-845 (1987); Cleland et al., Crit. Rev. Therapeutic Drug Carrier Systems 10:307-377 (1993).

[0133] A further embodiment of the invention relates to polypeptides which comprise the amino acid sequence of a polypeptide having an amino acid sequence which contains at least one amino acid substitution, but not more than 50 amino acid substitutions, even more preferably, not more than 40 amino acid substitutions, still more preferably, not more than 30 amino acid substitutions, and still even more preferably, not more than 20 amino acid substitutions from a polypeptide sequence disclosed herein. Of course it is highly preferable for a polypeptide to have an amino acid sequence which comprises the amino acid sequence of a polypeptide of SEQ ID NO:Y, an amino acid sequence encoded by SEQ ID NO:X, an amino acid sequence encoded by the portion of SEQ ID NO:X as defined in columns 8 and 9 of Table 2, an amino acid sequence encoded by the complement of SEQ ID NO:X, and/or the amino acid sequence encoded by cDNA contained in Clone ID NO:Z which contains, in order of ever-increasing preference, at least one, but not more than 10, 9, 8, 7, 6, 5, 4, 3, 2 or 1 amino acid substitutions.

[0134] In specific embodiments, the polypeptides of the invention comprise, or alternatively, consist of, fragments or variants of a reference amino acid sequence selected from: (a) the amino acid sequence of SEQ ID NO:Y or fragments thereof (e.g., the mature form and/or other fragments described herein); (b) the amino acid sequence encoded by SEQ ID NO:X or fragments thereof, (c) the amino acid sequence encoded by the complement of SEQ ID NO:X or fragments thereof, (d) the amino acid sequence encoded by the portion of SEQ ID NO:X as defined in columns 8 and 9 of Table 2 or fragments thereof, and (e) the amino acid sequence encoded by cDNA contained in Clone ID NO:Z or fragments thereof, wherein the fragments or variants have 1-5,5-10, 5-25, 5-50, 10-50 or 50-150, amino acid residue additions, substitutions, and/or deletions when compared to the reference amino acid sequence. In preferred embodiments, the amino acid substitutions are conservative. Polynucleotides encoding these polypeptides are also encompassed by the invention.

[0135] Polynucleotide and Polypeptide Fragments

[0136] The present invention is also directed to polynucleotide fragments of the polynucleotides (nucleic acids) of the invention. In the present invention, a “polynucleotide fragment” refers to a polynucleotide having a nucleic acid sequence which, for example: is a portion of the cDNA contained in Clone ID NO:Z or the complementary strand thereto; is a portion of the polynucleotide sequence encoding the polypeptide encoded by the cDNA contained in Clone ID NO:Z or the complementary strand thereto; is a portion of a polynucleotide sequence encoding the amino acid sequence encoded by the region of SEQ ID NO:X as defined in columns 8 and 9 of Table 2 or the complementary strand thereto; is a portion of the polynucleotide sequence of SEQ ID NO:X as defined in columns 8 and 9 of Table 2 or the complementary strand thereto; is a portion of the polynucleotide sequence in SEQ ID NO:X or the complementary strand thereto; is a polynucleotide sequence encoding a portion of the polypeptide of SEQ ID NO:Y; is a polynucleotide sequence encoding a portion of a polypeptide encoded by SEQ ID NO:X; is a polynucleotide sequence encoding a portion of a polypeptide encoded by the complement of the polynucleotide sequence in SEQ ID NO:X; is a portion of a polynucleotide sequence encoding the amino acid sequence encoded by the region of SEQ ID NO:B as defined in column 6 of Table 1B or the complementary strand thereto; or is a portion of the polynucleotide sequence of SEQ ID NO:B as defined in column 6 of Table 1B or the complementary strand thereto.

[0137] The polynucleotide fragments of the invention are preferably at least about 15 nt, and more preferably at least about 20 nt, still more preferably at least about 30 nt, and even more preferably, at least about 40 nt, at least about 50 nt, at least about 75 nt, or at least about 150 nt in length. A fragment “at least 20 nt in length,” for example, is intended to include 20 or more contiguous bases from the cDNA sequence contained in Clone ID NO:Z, or the nucleotide sequence shown in SEQ ID NO:X or the complementary stand thereto. In this context “about” includes the particularly recited value or a value larger or smaller by several (5, 4, 3, 2, or 1) nucleotides, at either terminus or at both termini. These nucleotide fragments have uses that include, but are not limited to, as diagnostic probes and primers as discussed herein. Of course, larger fragments (e.g., at least 160, 170, 180, 190, 200, 250, 500, 600, 1000, or 2000 nucleotides in length) are also encompassed by the invention.

[0138] Moreover, representative examples of polynucleotide fragments of the invention, comprise, or alternatively consist of, a sequence from about nucleotide number 1-50, 51-100, 101-150, 151-200, 201-250, 251-300, 301-350, 351-400, 401-450, 451-500, 501-550, 551-600, 651-700, 701-750, 751-800, 800-850, 851-900, 901-950, 951-1000, 1001-1050, 1051-1100, 1101-1150, 1151-1200, 1201-1250, 1251-1300, 1301-1350, 1351-1400, 1401-1450, 1451-1500, 1501-1550, 1551-1600, 1601-1650, 1651-1700, 1701-1750, 1751-1800, 1801-1850, 1851-1900, 1901-1950, 1951-2000, 2001-2050, 2051-2100, 2101-2150, 2151-2200, 2201-2250, 2251-2300, 2301-2350, 2351-2400, 2401-2450, 2451-2500, 2501-2550, 2551-2600, 2601-2650, 2651-2700, 2701-2750, 2751-2800, 2801-2850, 2851-2900, 2901-2950, 2951-3000, 3001-3050, 3051-3100, 3101-3150, 3151-3200, 3201-3250, 3251-3300, 3301-3350, 3351-3400, 3401-3450, 3451-3500, 3501-3550, 3551-3600, 3601-3650, 3651-3700, 3701-3750, 3751-3800, 3801-3850, 3851-3900, 3901-3950, 3951-4000, 4001-4050, 4051-4100, 4101-4150, 4151-4200, 4201-4250, 4251-4300, 4301-4350, 4351-4400, 4401-4450, 4451-4500, 4501-4550, 4551-4600, 4601-4650, 4651-4700, 4701-4750, 4751-4800, 4801-4850, 4851-4900, 4901-4950, 4951-5000, 5001-5050, 5051-5100, 5101-5150, 5151-5200, 5201-5250, 5251-5300, 5301-5350, 5351-5400, 5401-5450, 5451-5500, 5501-5550, 5551-5600, 5601-5650, 5651-5700, 5701-5750, 5751-5800, 5801-5850, 5851-5900, 5901-5950, 5951-6000, 6001-6050, 6051-6100, 6101-6150, 6151-6200, 6201-6250, 6251-6300, 6301-6350, 6351-6400, 6401-6450, 6451-6500, 6501-6550, 6551-6600, 6601-6650, 6651-6700, 6701-6750, 6751-6800, 6801-6850, 6851-6900, 6901-6950, 6951-7000, 7001-7050, 7051-7100, 7101-7150, 7151-7200, 7201-7250, 7251-7300 or 7301 to the end of SEQ ID NO:X, or the complementary strand thereto. In this context “about” includes the particularly recited range or a range larger or smaller by several (5, 4, 3, 2, or 1) nucleotides, at either terminus or at both termini. Preferably, these fragments encode a polypeptide which has a functional activity (e.g., biological activity). More preferably, these polynucleotides can be used as probes or primers as discussed herein. Polynucleotides which hybridize to one or more of these polynucleotides under stringent hybridization conditions or alternatively, under lower stringency conditions are also encompassed by the invention, as are polypeptides encoded by these polynucleotides.

[0139] Further representative examples of polynucleotide fragments of the invention, comprise, or alternatively consist of, a sequence from about nucleotide number 1-50, 51-100, 101-150, 151-200, 201-250, 251-300, 301-350, 351-400, 401-450, 451-500, 501-550, 551-600, 651-700, 701-750, 751-800, 800-850, 851-900, 901-950, 951-1000, 1001-1050, 1051-1100, 1101-1150, 1151-1200, 1201-1250, 1251-1300, 1301-1350, 1351-1400, 1401-1450, 1451-1500, 1501-1550, 1551-1600, 1601-1650, 1651-1700, 1701-1750, 1751-1800, 1801-1850, 1851-1900, 1901-1950, 1951-2000, 2001-2050, 2051-2100, 2101-2150, 2151-2200, 2201-2250, 2251-2300, 2301-2350, 2351-2400, 2401-2450, 2451-2500, 2501-2550, 2551-2600, 2601-2650, 2651-2700, 2701-2750, 2751-2800, 2801-2850, 2851-2900, 2901-2950, 2951-3000, 3001-3050, 3051-3100, 3101-3150, 3151-3200, 3201-3250, 3251-3300, 3301-3350, 3351-3400, 3401-3450, 3451-3500, 3501-3550, 3551-3600, 3601-3650, 3651-3700, 3701-3750, 3751-3800, 3801-3850, 3851-3900, 3901-3950, 3951-4000, 4001-4050, 4051-4100, 4101-4150, 4151-4200, 4201-4250, 4251-4300, 4301-4350, 4351-4400, 4401-4450, 4451-4500, 4501-4550, 45514600, 4601-4650, 4651-4700, 4701-4750, 4751-4800, 4801-4850, 4851-4900, 4901-4950, 4951-5000, 5001-5050, 5051-5100, 5101-5150, 5151-5200, 5201-5250, 5251-5300, 5301-5350, 5351-5400, 5401-5450, 5451-5500, 5501-5550, 5551-5600, 5601-5650, 5651-5700, 5701-5750, 5751-5800, 5801-5850, 5851-5900, 5901-5950, 5951-6000, 6001-6050, 6051-6100, 6101-6150, 6151-6200, 6201-6250, 6251-6300, 6301-6350, 6351-6400, 6401-6450, 6451-6500, 6501-6550, 6551-6600, 6601-6650, 6651-6700, 6701-6750, 6751-6800, 6801-6850, 6851-6900, 6901-6950, 6951-7000, 7001-7050, 7051-7100, 7101-7150, 7151-7200, 7201-7250, 7251-7300 or 7301 to the end of the cDNA sequence contained in Clone ID NO:Z, or the complementary strand thereto. In this context “about” includes the particularly recited range or a range larger or smaller by several (5, 4, 3, 2, or 1) nucleotides, at either terminus or at both termini. Preferably, these fragments encode a polypeptide which has a functional activity (e.g., biological activity). More preferably, these polynucleotides can be used as probes or primers as discussed herein. Polynucleotides which hybridize to one or more of these polynucleotides under stringent hybridization conditions or alternatively, under lower stringency conditions are also encompassed by the invention, as are polypeptides encoded by these polynucleotides.

[0140] Moreover, representative examples of polynucleotide fragments of the invention comprise, or alternatively consist of, a nucleic acid sequence comprising one, two, three, four, five, six, seven, eight, nine, ten, or more of the above described polynucleotide fragments of the invention in combination with a polynucleotide sequence delineated in Table 1B column 6. Additional, representative examples of polynucleotide fragments of the invention comprise, or alternatively consist of, a nucleic acid sequence comprising one, two, three, four, five, six, seven, eight, nine, ten, or more of the above described polynucleotide fragments of the invention in combination with a polynucleotide sequence that is the complementary strand of a sequence delineated in column 6 of Table 1B. In further embodiments, the above-described polynucleotide fragments of the invention comprise, or alternatively consist of, sequences delineated in Table 1B, column 6, and have a nucleic acid sequence which is different from that of the BAC fragment having the sequence disclosed in SEQ ID NO:B (see Table 1B, column 5). In additional embodiments, the above-described polynucleotide fragments of the invention comprise, or alternatively consist of, sequences delineated in Table 1B, column 6, and have a nucleic acid sequence which is different from that published for the BAC clone identified as BAC ID NO:A (see Table 1B, column 4). In additional embodiments, the above-described polynucleotides of the invention comprise, or alternatively consist of, sequences delineated Table 1B, column 6, and have a nucleic acid sequence which is different from that contained in the BAC clone identified as BAC ID NO:A (see Table. 1B, column 4). Polypeptides encoded by these polynucleotides, other polynucleotides that encode these polypeptides, and antibodies that bind these polypeptides are also encompassed by the invention. Additionally, fragments and variants of the above-described polynucleotides and polypeptides are also encompassed by the invention.

[0141] In additional specific embodiments, polynucleotides of the invention comprise, or alternatively consist of, one, two, three, four, five, six, seven, eight, nine, ten, or more fragments of the sequences delineated in column 6 of Table 1B, and the polynucleotide sequence of SEQ ID NO:X (e.g., as defined in Table 1B, column 2) or fragments or variants thereof. Polypeptides encoded by these polynucleotides, other polynucleotides that encode these polypeptides, and antibodies that bind these polypeptides are also encompassed by the invention.

[0142] In additional specific embodiments, polynucleotides of the invention comprise, or alternatively consist of, one, two, three, four, five, six, seven, eight, nine, ten, or more fragments of the sequences delineated in column 6 of Table 1B which correspond to the same Clone ID NO:Z (see Table 1B, column 1), and the polynucleotide sequence of SEQ ID NO:X (e.g., as defined in Table 1A or 1B) or fragments or variants thereof. Polypeptides encoded by these polynucleotides, other polynucleotides that encode these polypeptides, and antibodies that bind these polypeptides are also encompassed by the invention.

[0143] In further specific embodiments, polynucleotides of the invention comprise, or alternatively consist of, one, two, three, four, five, six, seven, eight, nine, ten, or more fragments of the sequences delineated in the same row of column 6 of Table 1B, and the polynucleotide sequence of SEQ ID NO:X (e.g., as defined in Table 1A or 1B) or fragments or variants thereof. Polypeptides encoded by these polynucleotides, other polynucleotides that encode these polypeptides, and antibodies that bind these polypeptides are also encompassed by the invention.

[0144] In additional specific embodiments, polynucleotides of the invention comprise, or alternatively consist of a polynucleotide sequence in which the 3′ 10 polynucleotides of one of the sequences delineated in column 6 of Table 1B and the 5′ 10 polynucleotides of the sequence of SEQ ID NO:X are directly contiguous. Nucleic acids which hybridize to the complement of these 20 contiguous polynucleotides under stringent hybridization conditions or alternatively, under lower stringency conditions, are also encompassed by the invention. Polypeptides encoded by these polynucleotides and/or nucleic acids, other polynucleotides and/or nucleic acids that encode these polypeptides, and antibodies that bind these polypeptides are also encompassed by the invention. Additionally, fragments and variants of the above-described polynucleotides, nucleic acids, and polypeptides are also encompassed by the invention.

[0145] In additional specific embodiments, polynucleotides of the invention comprise, or alternatively consist of a polynucleotide sequence in which the 3′ 10 polynucleotides of one of the sequences delineated in column 6 of Table 1B and the 5′ 10 polynucleotides of a fragment or variant of the sequence of SEQ ID NO:X (e.g., as described herein) are directly contiguous Nucleic acids which hybridize to the complement of these 20 contiguous polynucleotides under stringent hybridization conditions or alternatively, under lower stringency conditions, are also encompassed by the invention. Polypeptides encoded by these polynucleotides and/or nucleic acids, other polynucleotides and/or nucleic acids encoding these polypeptides, and antibodies that bind these polypeptides are also encompassed by the invention. Additionally, fragments and variants of the above-described polynucleotides, nucleic acids, and polypeptides are also encompassed by the invention.

[0146] In further specific embodiments, polynucleotides of the invention comprise, or alternatively consist of a polynucleotide sequence in which the 3′ 10 polynucleotides of a fragment or variant of the sequence of SEQ ID NO:X and the 5′ 10 polynucleotides of the sequence of one of the sequences delineated in column 6 of Table 1B are directly contiguous. Nucleic acids which hybridize to the complement of these 20 contiguous polynucleotides under stringent hybridization conditions or alternatively, under lower stringency conditions, are also encompassed by the invention. Polypeptides encoded by these polynucleotides and/or nucleic acids, other polynucleotides and/or nucleic acids encoding these polypeptides, and antibodies that bind these polypeptides are also encompassed by the invention. Additionally, fragments and variants of the above-described polynucleotides, nucleic acids, and polypeptides are also encompassed by the invention.

[0147] In specific embodiments, polynucleotides of the invention comprise, or alternatively consist of a polynucleotide sequence in which the 3′ 10 polynucleotides of one of the sequences delineated in column 6 of Table 1B and the 5′ 10 polynucleotides of another sequence in column 6 are directly contiguous. In preferred embodiments, the 3′ 10 polynucleotides of one of the sequences delineated in column 6 of Table 1B is directly contiguous with the 5′ 10 polynucleotides of the next sequential exon delineated in Table 1B, column 6. Nucleic acids which hybridize to the complement of these 20 contiguous polynucleotides under stringent hybridization conditions or alternatively, under lower stringency conditions, are also encompassed by the invention. Polypeptides encoded by these polynucleotides and/or nucleic acids, other polynucleotides and/or nucleic acids encoding these polypeptides, and antibodies that bind these polypeptides are also encompassed by the invention. Additionally, fragments and variants of the above-described polynucleotides, nucleic acids, and polypeptides are also encompassed by the invention.

[0148] In the present invention, a “polypeptide fragment” refers to an amino acid sequence which is a portion of that contained in SEQ ID NO:Y, a portion of an amino acid sequence encoded by the portion of SEQ ID NO:X as defined in columns 8 and 9 of Table 2, a portion of an amino acid sequence encoded by the polynucleotide sequence of SEQ ID NO:X, a portion of an amino acid sequence encoded by the complement of the polynucleotide sequence in SEQ ID NO:X, and/or a portion of an amino acid sequence encoded by the cDNA contained in Clone ID NO:Z. Protein (polypeptide) fragments may be “free-standing,” or comprised within a larger polypeptide of which the fragment forms a part or region, most preferably as a single continuous region. Representative examples of polypeptide fragments of the invention, include, for example, fragments comprising, or alternatively consisting of, from about amino acid number 1-20, 21-40, 41-60, 61-80, 81-100, 102-120, 121-140, 141-160, 161-180, 181-200, 201-220, 221-240, 241-260, 261-280, 281-300, 301-320, 321-340, 341-360, 361-380, 381-400, 401-420, 421-440, 441-460, 461-480, 481-500, 501-520, 521-540, 541-560, 561-580, 581-600, 601-620, 621-640, 641-660, 661-680, 681-700, 701-720, 721-740, 741-760, 761-780, 781-800, 801-820, 821-840, 841-860, 861-880, 881-900, 901-920, 921-940, 941-960, 961-980, 981-1000, 1001-1020, 1021-1040, 1041-1060, 1061-1080, 1081-1100, 1101-1120, 1121-1140, 1141-1160, 1161-1180, 1181-1200, 1201-1220, 1221-1240, 1241-1260, 1261-1280, 1281-1300, 1301-1320, 1321-1340, 1341-1360, 1361-1380, 1381-1400, 1401-1420, 1421-1440, or 1441 to the end of the coding region. In a preferred embodiment, polypeptide fragments of the invention include, for example, fragments comprising, or alternatively consisting of, from about amino acid number 1-20, 21-40, 41-60, 61-80, 81-100, 102-120, 121-140, 141-160, 161-180, 181-200, 201-220, 221-240, 241-260, 261-280, 281-300, 301-320, 321-340, 341-360, 361-380, 381-400, 401420, 421-440, 441-460, 461-480, 481-500, 501-520, 521-540, 541-560, 561-580, 581-600, 601-620, 621-640, 641-660, 661-680, 681-700, 701-720, 721-740, 741-760, 761-780, 781-800, 801-820, 821-840, 841-860, 861-880, 881-900, 901-920, 921-940, 941-960, 961-980, 981-1000, 1001-1020, 1021-1040, 1041-1060, 1061-1080, 1081-1100, 1101-1120, 1121-1140, 1141-1160, 1161-1180, 1181-1200, 1201-1220, 1221-1240, 1241-1260, 1261-1280, 1281-1300, 1301-1320, 1321-1340, 1341-1360, 1361-1380, 1381-1400, 1401-1420, 1421-1440, or 1441 to the end of the coding region of SEQ ID NO:Y. Moreover, polypeptide fragments of the invention may be at least about 10, 15, 20, 25, 30, 35, 40, 45, 50, 55, 60, 65, 70, 75, 80, 85, 90, 100, 110, 120, 130, 140, or 150 amino acids in length. In this context “about” includes the particularly recited ranges or values, or ranges or values larger or smaller by several (5, 4, 3, 2, or 1) amino acids, at either extreme or at both extremes. Polynucleotides encoding these polypeptide fragments are also encompassed by the invention.

[0149] Even if deletion of one or more amino acids from the N-terminus of a protein results in modification of loss of one or more biological functions of the protein, other functional activities (e.g., biological activities, ability to multimerize, ability to bind a ligand) may still be retained. For example, the ability of shortened muteins to induce and/or bind to antibodies which recognize the complete or mature forms of the polypeptides generally will be retained when less than the majority of the residues of the complete or mature polypeptide are removed from the N-terminus. Whether a particular polypeptide lacking N-terminal residues of a complete polypeptide retains such immunologic activities can readily be determined by routine methods described herein and otherwise known in the art. It is not unlikely that a mutein with a large number of deleted N-terminal amino acid residues may retain some biological or immunogenic activities. In fact, peptides composed of as few as six amino acid residues may often evoke an immune response.

[0150] Accordingly, polypeptide fragments include the secreted protein as well as the mature form. Further preferred polypeptide fragments include the secreted protein or the mature form having a continuous series of deleted residues from the amino or the carboxy terminus, or both. For example, any number of amino acids, ranging from 1-60, can be deleted from the amino terminus of either the secreted polypeptide or the mature form. Similarly, any number of amino acids, ranging from 1-30, can be deleted from the carboxy terminus of the secreted protein or mature form. Furthermore, any combination of the above amino and carboxy terminus deletions is preferred. Similarly, polynucleotides encoding these polypeptide fragments are also preferred.

[0151] The present invention further provides polypeptides having one or more residues deleted from the amino terminus of the amino acid sequence of a polypeptide disclosed herein (e.g., a polypeptide of SEQ ID NO:Y, a polypeptide encoded by the polynucleotide sequence contained in SEQ ID NO:X or the complement thereof, a polypeptide encoded by the portion of SEQ ID NO:X as defined in columns 8 and 9 of Table 2, a polypeptide encoded by the portion of SEQ ID NO:B as defined in column 6 of Table 1B, and/or a polypeptide encoded by the cDNA contained in Clone ID NO:Z). In particular, N-terminal deletions may be described by the general formula m−q, where q is a whole integer representing the total number of amino acid residues in a polypeptide of the invention (e.g., the polypeptide disclosed in SEQ ID NO:Y, or the polypeptide encoded by the portion of SEQ ID NO:X as defined in columns 8 and 9 of Table 2), and m is defined as any integer ranging from 2 to q−6. Polynucleotides encoding these polypeptides are also encompassed by the invention.

[0152] The present invention further provides polypeptides having one or more residues from the carboxy terminus of the amino acid sequence of a polypeptide disclosed herein (e.g., a polypeptide of SEQ ID NO:Y, a polypeptide encoded by the polynucleotide sequence contained in SEQ ID NO:X, a polypeptide encoded by the portion of SEQ ID NO:X as defined in columns 8 and 9 of Table 2, and/or a polypeptide encoded by the cDNA contained in Clone ID NO:Z). In particular, C-terminal deletions may be described by-the general formula 1−n, where n is any whole integer ranging from 6 to q−1, and where n corresponds to the position of amino acid residue in a polypeptide of the invention. Polynucleotides encoding these polypeptides are also encompassed by the invention.

[0153] In addition, any of the above described N- or C-terminal deletions can be combined to produce a N- and C-terminal deleted polypeptide. The invention also provides polypeptides having one or more amino acids deleted from both the amino and the carboxyl termini, which may be described generally as having residues m-n of a polypeptide encoded by SEQ ID NO:X (e.g., including, but not limited to, the preferred polypeptide disclosed as SEQ ID NO:Y and the polypeptide encoded by the portion of SEQ ID NO:X as defined in columns 8 and 9 of Table 2), the cDNA contained in Clone ID NO:Z, and/or the complement thereof, where n and m are integers as described above. Polynucleotides encoding these polypeptides are also encompassed by the invention.

[0154] Also as mentioned above, even if deletion of one or more amino acids from the C-terminus of a protein results in modification of loss of one or more biological functions of the protein, other functional activities (e.g., biological activities, ability to multimerize, ability to bind a ligand) may still be retained. For example the ability of the shortened mutein to induce and/or bind to antibodies which recognize the complete or mature forms of the polypeptide generally will be retained when less than the majority of the residues of the complete or mature polypeptide are removed from the C-terminus. Whether a particular polypeptide lacking C-terminal residues of a complete polypeptide retains such immunologic activities can readily be determined by routine methods described herein and otherwise known in the art. It is not unlikely that a mutein with a large number of deleted C-terminal amino acid residues may retain some biological or immunogenic activities. In fact, peptides composed of as few as six amino acid residues may often evoke an immune response.

[0155] The present application is also directed to proteins containing polypeptides at least 80%, 85%, 90%, 95%, 96%, 97%, 98% or 99% identical to a polypeptide sequence set forth herein. In preferred embodiments, the application is directed to proteins containing polypeptides at least 80%, 85%, 90%, 95%, 96%, 97%, 98% or 99% identical to polypeptides having the amino acid sequence of the specific N- and C-terminal deletions. Polynucleotides encoding these polypeptides are also encompassed by the invention.

[0156] Any polypeptide sequence encoded by, for example, the polynucleotide sequences set forth as SEQ ID NO:X or the complement thereof, (presented, for example, in Tables 1A and 2), the cDNA contained in Clone ID NO:Z, or the polynucleotide sequence as defined in column 6 of Table 1B, may be analyzed to determine certain preferred regions of the polypeptide. For example, the amino acid sequence of a polypeptide encoded by a polynucleotide sequence of SEQ ID NO:X (e.g., the polypeptide of SEQ ID NO:Y and the polypeptide encoded by the portion of SEQ ID NO:X as defined in columns 8 and 9 of Table 2) or the cDNA contained in Clone ID NO:Z may be analyzed using the default parameters of the DNASTAR computer algorithm (DNASTAR, Inc., 1228 S. Park St., Madison, Wis. 53715 USA; http://www.dnastar.com/).

[0157] Polypeptide regions that may be routinely obtained using the DNASTAR computer algorithm include, but are not limited to, Garnier-Robson alpha-regions, beta-regions, turn-regions, and coil-regions; Chou-Fasman alpha-regions, beta-regions, and turn-regions; Kyte-Doolittle hydrophilic regions and hydrophobic regions; Eisenberg alpha- and beta-amphipathic regions; Karplus-Schulz flexible regions; Emini surface-forming regions; and Jameson-Wolf regions of high antigenic index. Among highly preferred polynucleotides of the invention in this regard are those that encode polypeptides comprising regions that combine several structural features, such as several (e.g., 1, 2, 3 or 4) of the features set out above.

[0158] Additionally, Kyte-Doolittle hydrophilic regions and hydrophobic regions, Emini surface-forming regions, and Jameson-Wolf regions of high antigenic index (i.e., containing four or more contiguous amino acids having an antigenic index of greater than or equal to 1.5, as identified using the default parameters of the Jameson-Wolf program) can routinely be used to determine polypeptide regions that exhibit a high degree of potential for antigenicity. Regions of high antigenicity are determined from data by DNASTAR analysis by choosing values which represent regions of the polypeptide which are likely to be exposed on the surface of the polypeptide in an environment in which antigen recognition may occur in the process of initiation of an immune response.

[0159] Preferred polypeptide fragments of the invention are fragments comprising, or alternatively, consisting of, an amino acid sequence that displays a functional activity (e.g. biological activity) of the polypeptide sequence of which the amino acid sequence is a fragment. By a polypeptide displaying a “functional activity” is meant a polypeptide capable of one or more known functional activities associated with a full-length protein, such as, for example, biological activity, antigenicity, immunogenicity, and/or multimerization, as described herein.

[0160] Other preferred polypeptide fragments are biologically active fragments. Biologically active fragments are those exhibiting activity similar, but not necessarily identical, to an activity of the polypeptide of the present invention. The biological activity of the fragments may include an improved desired activity, or a decreased undesirable activity.

[0161] In preferred embodiments, polypeptides of the invention comprise, or alternatively consist of, one, two, three, four, five or more of the antigenic fragments of the polypeptide of SEQ ID NO:Y, or portions thereof. Polynucleotides encoding these polypeptides are also encompassed by the invention.

[0162] The present invention encompasses polypeptides comprising, or alternatively consisting of, an epitope of: the polypeptide sequence shown in SEQ ID NO:Y; a polypeptide sequence encoded by SEQ ID NO:X or the complementary strand thereto; the polypeptide sequence encoded by the portion of SEQ ID NO:X as defined in columns 8 and 9 of Table 2; the polypeptide sequence encoded by the portion of SEQ ID NO:B as defined in column 6 of Table 1B or the complement thereto; the polypeptide sequence encoded by the cDNA contained in Clone ID NO:Z; or the polypeptide sequence encoded by a polynucleotide that hybridizes to the sequence of SEQ ID NO:X, the complement of the sequence of SEQ ID NO:X, the complement of a portion of SEQ ID NO:X as defined in columns 8 and 9 of Table 2, or the cDNA sequence contained in Clone ID NO:Z under stringent hybridization conditions or alternatively, under lower stringency hybridization as defined supra. The present invention further encompasses polynucleotide sequences encoding an epitope of a polypeptide sequence of the invention (such as, for example, the sequence disclosed in SEQ ID NO:X, or a fragment thereof), polynucleotide sequences of the complementary strand of a polynucleotide sequence encoding an epitope of the invention, and polynucleotide sequences which hybridize to the complementary strand under stringent hybridization conditions or alternatively, under lower stringency hybridization conditions defined supra.

[0163] The term “epitopes,” as used herein, refers to portions of a polypeptide having antigenic or immunogenic activity in an animal, preferably a mammal, and most preferably in a human. In a preferred embodiment, the present invention encompasses a polypeptide comprising an epitope, as well as the polynucleotide encoding this polypeptide. An “immunogenic epitope,” as used herein, is defined as a portion of a protein that elicits an antibody response in an animal, as determined by any method known in the art, for example, by the methods for generating antibodies described infra. (See, for example, Geysen et al., Proc. Natl. Acad. Sci. USA 81:3998-4002 (1983)). The term “antigenic epitope,” as used herein, is defined as a portion of a protein to which an antibody can immunospecifically bind its antigen as determined by any method well known in the art, for example, by the immunoassays described herein. Immunospecific binding excludes non-specific binding but does not necessarily exclude cross-reactivity with other antigens. Antigenic epitopes need not necessarily be immunogenic.

[0164] Fragments which function as epitopes may be produced by any conventional means. (See, e.g., Houghten, R. A., Proc. Natl. Acad. Sci. USA 82:5131-5135 (1985) further described in U.S. Pat. No. 4,631,211.)

[0165] In the present invention, antigenic epitopes preferably contain a sequence of at least 4, at least 5, at least 6, at least 7, more preferably at least 8, at least 9, at least 10, at least 11, at least 12, at least 13, at least 14, at least 15, at least 20, at least 25, at least 30, at least 40, at least 50, and, most preferably, between about 15 to about 30 amino acids. Preferred polypeptides comprising immunogenic or antigenic epitopes are at least 10, 15, 20, 25, 30, 35, 40, 45, 50, 55, 60, 65, 70, 75, 80, 85, 90, 95, or 100 amino acid residues in length. Additional non-exclusive preferred antigenic epitopes include the antigenic epitopes disclosed herein, as well as portions thereof. Antigenic epitopes are useful, for example, to raise antibodies, including monoclonal antibodies, that specifically bind the epitope. Preferred antigenic epitopes include the antigenic epitopes disclosed herein, as well as any combination of two, three, four, five or more of these antigenic epitopes. Antigenic epitopes can be used as the target molecules in immunoassays. (See, for instance, Wilson et al., Cell 37:767-778 (1984); Sutcliffe et al., Science 219:660-666 (1983)).

[0166] Non-limiting examples of epitopes of polypeptides that can be used to generate antibodies of the invention include a polypeptide comprising, or alternatively consisting of, at least one, two, three, four, five, six or more of the portion(s) of SEQ ID NO:Y specified in column 6 of Table 1A. These polypeptide fragments have been determined to bear antigenic epitopes of the proteins of the invention by the analysis of the Jameson-Wolf antigenic index which is included in the DNAStar suite of computer programs. By “comprise” it is intended that a polypeptide contains at least one, two, three, four, five, six or more of the portion(s) of SEQ ID NO:Y shown in column 6 of Table 1A, but it may contain additional flanking residues on either the amino or carboxyl termini of the recited portion. Such additional flanking sequences are preferably sequences naturally found adjacent to the portion; i.e., contiguous sequence shown in SEQ ID NO:Y. The flanking sequence may, however, be sequences from a heterologous polypeptide, such as from another protein described herein or from a heterologous polypeptide not described herein. In particular embodiments, epitope portions of a polypeptide of the invention comprise one, two, three, or more of the portions of SEQ ID NO:Y shown in column 6 of Table 1A. Polynucleotides encoding these polypeptides are also encompassed by the invention.

[0167] Similarly, immunogenic epitopes can be used, for example, to induce antibodies according to methods well known in the art. See, for instance, Sutcliffe et al., supra; Wilson et al., supra; Chow et al., Proc. Natl. Acad. Sci. USA 82:910-914; and Bittle et al., J. Gen. Virol. 66:2347-2354 (1985). Preferred immunogenic epitopes include the immunogenic epitopes disclosed herein, as well as any combination of two, three, four, five or more of these immunogenic epitopes. The polypeptides comprising one or more immunogenic epitopes may be presented for eliciting an antibody response together with a carrier protein, such as an albumin, to an animal system (such as rabbit or mouse), or, if the polypeptide is of sufficient length (at least about 25 amino acids), the polypeptide may be presented without a carrier. However, immunogenic epitopes comprising as few as 8 to 10 amino acids have been shown to be sufficient to raise antibodies capable of binding to, at the very least, linear epitopes in a denatured polypeptide (e.g., in Western blotting).

[0168] Epitope-bearing polypeptides of the present invention may be used to induce antibodies according to methods well known in the art including, but not limited to, in vivo immunization, in vitro immunization, and phage display methods. See, e.g., Sutcliffe et al., supra; Wilson et al., supra, and Bittle et al., J. Gen. Virol., 66:2347-2354 (1985). If in vivo immunization is used, animals may be immunized with free peptide; however, anti-peptide antibody titer may be boosted by coupling the peptide to a macromolecular carrier, such as keyhole limpet hemacyanin (KLH) or tetanus toxoid. For instance, peptides containing cysteine residues may be coupled to a carrier using a linker such as maleimidobenzoyl-N-hydroxysuccinimide ester (MBS), while other peptides may be coupled to carriers using a more general linking agent such as glutaraldehyde. Animals such as rabbits, rats and mice are immunized with either free or carrier-coupled peptides, for instance, by intraperitoneal and/or intradermal injection of emulsions containing about 100 μg of peptide or carrier protein and Freund's adjuvant or any other adjuvant known for stimulating an immune response. Several booster injections may be needed, for instance, at intervals of about two weeks, to provide a useful titer of anti-peptide antibody which can be detected, for example, by ELISA assay using free peptide adsorbed to a solid surface. The titer of anti-peptide antibodies in serum from an immunized animal may be increased by selection of anti-peptide antibodies, for instance, by adsorption to the peptide on a solid support and elution of the selected antibodies according to methods well known in the art.

[0169] As one of skill in the art will appreciate, and as discussed above, the polypeptides of the present invention (e.g., those comprising an immunogenic or antigenic epitope) can be fused to heterologous polypeptide sequences. For example, polypeptides of the present invention (including fragments or variants thereof), may be fused with the constant domain of immunoglobulins (IgA, IgE, IgG, IgM), or portions thereof (CH1, CH2, CH3, or any combination thereof and portions thereof, resulting in chimeric polypeptides. By way of another non-limiting example, polypeptides and/or antibodies of the present invention (including fragments or variants thereof) may be fused with albumin (including but not limited to recombinant human serum albumin or fragments or variants thereof (see, e.g., U.S. Pat. No. 5,876,969, issued Mar. 2, 1999, EP Patent 0 413 622, and U.S. Pat. No. 5,766,883, issued Jun. 16, 1998, herein incorporated by reference in their entirety)). In a preferred embodiment, polypeptides and/or antibodies of the present invention (including fragments or variants thereof) are fused with the mature form of human serum albumin (i.e., amino acids 1-585 of human serum albumin as shown in FIGS. 1 and 2 of EP Patent 0 322 094) which is herein incorporated by reference in its entirety. In another preferred embodiment, polypeptides and/or antibodies of the present invention (including fragments or variants thereof) are fused with polypeptide fragments comprising, or alternatively consisting of, amino acid residues 1-z of human serum albumin, where z is an integer from 369 to 419, as described in U.S. Pat. No. 5,766,883 herein incorporated by reference in its entirety. Polypeptides and/or antibodies of the present invention (including fragments or variants thereof) may be fused to either the N- or C-terminal end of the heterologous protein (e.g., immunoglobulin Fc polypeptide or human serum albumin polypeptide). Polynucleotides encoding fusion proteins of the invention are also encompassed by the invention.

[0170] Such fusion proteins as those described above may facilitate purification and may increase half-life in vivo. This has been shown for chimeric proteins consisting of the first two domains of the human CD4-polypeptide and various domains of the constant regions of the heavy or light chains of mammalian immunoglobulins. See, e.g., EP 394,827; Traunecker et al., Nature, 331:84-86 (1988). Enhanced delivery of an antigen across the epithelial barrier to the immune system has been demonstrated for antigens (e.g., insulin) conjugated to an FcRn binding partner such as IgG or Fc fragments (see, e.g., PCT Publications WO 96/22024 and WO 99/04813). IgG Fusion proteins that have a disulfide-linked dimeric structure due to the IgG portion desulfide bonds have also been found to be more efficient in binding and neutralizing other molecules than monomeric polypeptides or fragments thereof alone. See, e.g., Fountoulakis et al., J. Biochem., 270:3958-3964 (1995). Nucleic acids encoding the above epitopes can also be recombined with a gene of interest as an epitope tag (e.g., the hemagglutinin (HA) tag or flag tag) to aid in detection and purification of the expressed polypeptide. For example, a system described by Janknecht et al. allows for the ready purification of non-denatured fusion proteins expressed in human cell lines (Janknecht et al., 1991, Proc. Natl. Acad. Sci. USA 88:8972-897). In this system, the gene of interest is subcloned into a vaccinia recombination plasmid such that the open reading frame of the gene is translationally fused to an amino-terminal tag consisting of six histidine residues. The tag serves as a matrix binding domain for the fusion protein. Extracts from cells infected with the recombinant vaccinia virus are loaded onto Ni2+ nitriloacetic acid-agarose column and histidine-tagged proteins can be selectively eluted with imidazole-containing buffers.

[0171] Fusion Proteins

[0172] Any polypeptide of the present invention can be used to generate fusion proteins. For example, the polypeptide of the present invention, when fused to a second protein, can be used as an antigenic tag. Antibodies raised against the polypeptide of the present invention can be used to indirectly detect the second protein by binding to the polypeptide. Moreover, because secreted proteins target cellular locations based on trafficking signals, polypeptides of the present invention which are shown to be secreted can be used as targeting molecules once fused to other proteins.

[0173] Examples of domains that can be fused to polypeptides of the present invention include not only heterologous signal sequences, but also other heterologous functional regions. The fusion does not necessarily need to be direct, but may occur through linker sequences.

[0174] In certain preferred embodiments, proteins of the invention are fusion proteins comprising an amino acid sequence that is an N and/or C-terminal deletion of a polypeptide of the invention. In preferred embodiments, the invention is directed to a fusion protein comprising an amino acid sequence that is at least 80%, 85%, 90%, 95%, 96%, 97%, 98% or 99% identical to a polypeptide sequence of the invention. Polynucleotides encoding these proteins are also encompassed by the invention.

[0175] Moreover, fusion proteins may also be engineered to improve characteristics of the polypeptide of the present invention. For instance, a region of additional amino acids, particularly charged amino acids, may be added to the N-terminus of the polypeptide to improve stability and persistence during purification from the host cell or subsequent handling and storage. Also, peptide moieties may be added to the polypeptide to facilitate purification. Such regions may be removed prior to final preparation of the polypeptide. The addition of peptide moieties to facilitate handling of polypeptides are familiar and routine techniques in the art.

[0176] As one of skill in the art will appreciate that, as discussed above, polypeptides of the present invention, and epitope-bearing fragments thereof, can be combined with heterologous polypeptide sequences. For example, the polypeptides of the present invention may be fused with heterologous polypeptide sequences, for example, the polypeptides of the present invention may be fused with the constant domain of immunoglobulins (IgA, IgE, IgG, IgM) or portions thereof (CH1, CH2, CH3, and any combination thereof, including both entire domains and portions thereof), or albumin (including, but not limited to, native or recombinant human albumin or fragments or variants thereof (see, e.g., U.S. Pat. No. 5,876,969, issued Mar. 2, 1999, EP Patent 0 413 622, and U.S. Pat. No. 5,766,883, issued Jun. 16, 1998, herein incorporated by reference in their entirety)), resulting in chimeric polypeptides. For example, EP-A-O 464 533 (Canadian counterpart 2045869) discloses fusion proteins comprising various portions of constant region of immunoglobulin molecules together with another human protein or part thereof. In many cases, the Fc part in a fusion protein is beneficial in therapy and diagnosis, and thus can result in, for example, improved pharmacokinetic properties (EP-A 0232 262). Alternatively, deleting the Fc part after the fusion protein has been expressed, detected, and purified, would be desired. For example, the Fc portion may hinder therapy and diagnosis if the fusion protein is used as an antigen for immunizations. In drug discovery, for example, human proteins, such as hIL-5, have been fused with Fc portions for the purpose of high-throughput screening assays to identify antagonists of hIL-5. See, D. Bennett et al., J. Molecular Recognition 8:52-58 (1995); K. Johanson et al., J. Biol. Chem. 270:9459-9471 (1995).

[0177] Moreover, the polypeptides of the present invention can be fused to marker sequences, such as a polypeptide which facilitates purification of the fused polypeptide. In preferred embodiments, the marker amino acid sequence is a hexa-histidine peptide, such as the tag provided in a pQE vector (QIAGEN, Inc., 9259 Eton Avenue, Chatsworth, Calif., 91311), among others, many of which are commercially available. As described in Gentz et al., Proc. Natl. Acad. Sci. USA 86:821-824 (1989), for instance, hexa-histidine provides for convenient purification of the fusion protein. Another peptide tag useful for purification, the “HA” tag, corresponds to an epitope derived from the influenza hemagglutinin protein (Wilson et al., Cell 37:767 (1984).)

[0178] Additional fusion proteins of the invention may be generated through the techniques of gene-shuffling, motif-shuffling, exon-shuffling, and/or codon-shuffling (collectively referred to as “DNA shuffling”), briefly described below, and further described herein. DNA shuffling may be employed to modulate the activities of polypeptides of the invention, such methods can be used to generate polypeptides with altered activity, as well as agonists and antagonists of the polypeptides. See, generally, U.S. Pat. Nos. 5,605,793; 5,811,238; 5,830,721; 5,834,252; and 5,837,458, and Patten et al., Curr. Opinion Biotechnol. 8:724-33 (1997); Harayama, Trends Biotechnol. 16(2):76-82 (1998); Hansson et al., J. Mol. Biol. 287:265-76 (1999); and Lorenzo and Blasco, Biotechniques 24(2):308-13 (1998); each of these patents and publications are hereby incorporated by reference in its entirety). In a preferred embodiment, one or more components, motifs, sections, parts, domains, fragments, etc., of a polynucleotide encoding a polypeptide of the invention may be recombined with one or more components, motifs, sections, parts, domains, fragments, etc., of one or more heterologous molecules encoding a heterologous polypeptide.

[0179] Thus, any of these above fusions can be engineered using the polynucleotides or the polypeptides of the present invention.

[0180] Recombinant and Synthetic Production of Polypeptides of the Invention

[0181] The present invention also relates to vectors containing the polynucleotide of the present invention, host cells, and the production of polypeptides by synthetic and recombinant techniques. The vector may be, for example, a phage, plasmid, viral, or retroviral vector. Retroviral vectors may be replication competent or replication defective. In the latter case, viral propagation generally will occur only in complementing host cells.

[0182] The polynucleotides of the invention may be joined to a vector containing a selectable marker for propagation in a host. Generally, a plasmid vector is introduced in a precipitate, such as a calcium phosphate precipitate, or in a complex with a charged lipid. If the vector is a virus, it may be packaged in vitro using an appropriate packaging cell line and then transduced into host cells.

[0183] The polynucleotide insert should be operatively linked to an appropriate promoter, such as the phage lambda PL promoter, the E. coli lac, trp, phoA and tac promoters, the SV40 early and late promoters and promoters of retroviral LTRs, to name a few. Other suitable promoters will be known to the skilled artisan. The expression constructs will further contain sites for transcription initiation, termination, and, in the transcribed region, a ribosome binding site for translation. The coding portion of the transcripts expressed by the constructs will preferably include a translation initiating codon at the beginning and a termination codon (UAA, UGA or UAG) appropriately positioned at the end of the polypeptide to be translated.

[0184] As indicated, the expression vectors will preferably include at least one selectable marker. Such markers include dihydrofolate reductase, G418 or neomycin resistance, glutamine synthase, for eukaryotic cell culture and tetracycline, kanamycin or ampicillin resistance genes for culturing in E. coli and other bacteria. Representative examples of appropriate hosts include, but are not limited to, bacterial cells, such as E. coli, Streptomyces and Salmonella typhimurium cells; fungal cells, such as yeast cells (e.g., Saccharomyces cerevisiae or Pichia pastoris (ATCC Accession No. 201178)); insect cells such as Drosophila S2 and Spodoptera Sf9 cells; animal cells such as CHO, COS, 293, NSO and Bowes melanoma cells; and plant cells. Appropriate culture mediums and conditions for the above-described host cells are known in the art.

[0185] Among vectors preferred for use in bacteria include pQE70, pQE60 and pQE-9, available from QIAGEN, Inc.; pBluescript vectors, Phagescript vectors, pNH8A, pNH16a, pNH18A, pNH46A, available from Stratagene Cloning Systems, Inc.; and ptrc99a, pKK223-3, pKK233-3, pDR540, pRIT5 available from Pharmacia Biotech, Inc. Among preferred eukaryotic vectors are pWLNEO, pSV2CAT, pOG44, pXT1 and pSG available from Stratagene; and pSVK3, pBPV, pMSG and pSVL available from Pharmacia. Preferred expression vectors for use in yeast systems include, but are not limited to pYES2, pYD1, pTEF1/Zeo, pYES2/GS, pPICZ, pGAPZ, pGAPZalph, pPIC9, pPIC3.5, pHIL-D2, pHIL-S1, pPIC3.5K, pPIC9K, and PAO815 (all available from Invitrogen, Carlsbad, Calif.). Other suitable vectors will be readily apparent to the skilled artisan.

[0186] Vectors which use glutamine synthase (GS) or DHFR as the selectable markers can be amplified in the presence of the drugs methionine sulphoximine or methotrexate, respectively. An advantage of glutamine synthase based vectors is the availabilty of cell lines (e.g., the murine myeloma cell line, NSO) which are glutamine synthase negative. Glutamine synthase expression systems can also function in glutamine synthase expressing cells (e.g., Chinese Hamster Ovary (CHO) cells) by providing additional inhibitor to prevent the functioning of the endogenous gene. A glutamine synthase expression system and components thereof are detailed in PCT publications: WO87/04462; WO86/05807; WO89/01036; WO89/10404; and WO91/06657 which are hereby incorporated in their entireties by reference herein. Additionally, glutamine synthase expression vectors can be obtained from Lonza Biologics, Inc. (Portsmouth, N.H.). Expression and production of monoclonal antibodies using a GS expression system in murine myeloma cells is described in Bebbington et al., Bio/technology 10:169(1992) and in Biblia and Robinson Biotechnol. Prog. 11:1 (1995) which are herein incorporated by reference.

[0187] The present invention also relates to host cells containing the above-described vector constructs described herein, and additionally encompasses host cells containing nucleotide sequences of the invention that are operably associated with one or more heterologous control regions (e.g., promoter and/or enhancer) using techniques known of in the art. The host cell can be a higher eukaryotic cell, such as a mammalian cell (e.g., a human derived cell), or a lower eukaryotic cell, such as a yeast cell, or the host cell can be a prokaryotic cell, such as a bacterial cell. A host strain may be chosen which modulates the expression of the inserted gene sequences, or modifies and processes the gene product in the specific fashion desired. Expression from certain promoters can be elevated in the presence of certain inducers; thus expression of the genetically engineered polypeptide may be controlled. Furthermore, different host cells have characteristics and specific mechanisms for the translational and post-translational processing and modification (e.g., phosphorylation, cleavage) of proteins. Appropriate cell lines can be chosen to ensure the desired modifications and processing of the foreign protein expressed.

[0188] Introduction of the nucleic acids and nucleic acid constructs of the invention into the host cell can be effected by calcium phosphate transfection, DEAE-dextran mediated transfection, cationic lipid-mediated transfection, electroporation, transduction, infection, or other methods. Such methods are described in many standard laboratory manuals, such as Davis et al., Basic Methods In Molecular Biology (1986). It is specifically contemplated that the polypeptides of the present invention may in fact be expressed by a host cell lacking a recombinant vector.

[0189] In addition to encompassing host cells containing the vector constructs discussed herein, the invention also encompasses primary, secondary, and immortalized host cells of vertebrate origin, particularly mammalian origin, that have been engineered to delete or replace endogenous genetic material (e.g., ovarian and/or breast antigen coding sequence), and/or to include genetic material (e.g., heterologous polynucleotide sequences) that is operably associated with ovarian and/or breast associated polynucleotides of the invention, and which activates, alters, and/or amplifies endogenous ovarian and/or breast associated polynucleotides. For example, techniques known in the art may be used to operably associate heterologous control regions (e.g., promoter and/or enhancer) and endogenous ovarian and/or breast associated polynucleotide sequences via homologous recombination (see, e.g., U.S. Pat. No. 5,641,670, issued Jun. 24, 1997; International Publication Number WO 96/29411; International Publication Number WO 94/12650; Koller et al., Proc. Natl. Acad. Sci. USA 86:8932-8935 (1989); and Zijlstra et al., Nature 342:435-438 (1989), the disclosures of each of which are incorporated by reference in their entireties).

[0190] Polypeptides of the present invention can also be recovered from: products purified from natural sources, including bodily fluids, tissues and cells, whether directly isolated or cultured; products of chemical synthetic procedures; and products produced by recombinant techniques from a prokaryotic or eukaryotic host, including, for example, bacterial, yeast, higher plant, insect, and mammalian cells. Depending upon the host employed in a recombinant production procedure, the polypeptides of the present invention may be glycosylated or may be non-glycosylated. In addition, polypeptides of the invention may also include an initial modified methionine residue, in some cases as a result of host-mediated processes. Thus, it is well known in the art that the N-terminal methionine encoded by the translation initiation codon generally is removed with high efficiency from any protein after translation in all eukaryotic cells. While the N-terminal methionine on most proteins also is efficiently removed in most prokaryotes, for some proteins, this prokaryotic removal process is inefficient, depending on the nature of the amino acid to which the N-terminal methionine is covalently linked.

[0191] In one embodiment, the yeast Pichia pastoris is used to express polypeptides of the invention in a eukaryotic system. Pichia pastoris is a methylotrophic yeast which can metabolize methanol as its sole carbon source. A main step in the methanol metabolization pathway is the oxidation of methanol to formaldehyde using O₂. This reaction is catalyzed by the enzyme alcohol oxidase. In order to metabolize methanol as its sole carbon source, Pichia pastoris must generate high levels of alcohol oxidase due, in part, to the relatively low affinity of alcohol oxidase for O₂. Consequently, in a growth medium depending on methanol as a main carbon source, the promoter region of one of the two alcohol oxidase genes (AOX1) is highly active. In the presence of methanol, alcohol oxidase produced from the AOX1 gene comprises up to approximately 30% of the total soluble protein in Pichia pastoris. See, Ellis, S. B., et al., Mol. Cell. Biol. 5:1111-21 (1985); Koutz, P. J, et al., Yeast 5:167-77 (1989); Tschopp, J. F., et al., Nucl. Acids Res. 15:3859-76 (1987). Thus, a heterologous coding sequence, such as, for example, a polynucleotide of the present invention, under the transcriptional regulation of all or part of the AOX1 regulatory sequence is expressed at exceptionally high levels in Pichia yeast grown in the presence of methanol.

[0192] In one example, the plasmid vector pPIC9K is used to express DNA encoding a polypeptide of the invention, as set forth herein, in a Pichea yeast system essentially as described in “Pichia Protocols: Methods in Molecular Biology,” D. R. Higgins and J. Cregg, eds. The Humana Press, Totowa, N.J., 1998. This expression vector allows expression and secretion of a polypeptide of the invention by virtue of the strong AOX1 promoter linked to the Pichia pastoris alkaline phosphatase (PHO) secretory signal peptide (i.e., leader) located upstream of a multiple cloning site.

[0193] Many other yeast vectors could be used in place of pPIC9K, such as, pYES2, pYD1, pTEF1/Zeo, pYES2/GS, pPICZ, pGAPZ, pGAPZalpha, pPIC9, pPIC3.5, pHIL-D2, pHIL-S1, pPIC3.5K, and PA0815, as one skilled in the art would readily appreciate, as long as the proposed expression construct provides appropriately located signals for transcription, translation, secretion (if desired), and the like, including an in-frame AUG as required.

[0194] In another embodiment, high-level expression of a heterologous coding sequence, such as, for example, a polynucleotide of the present invention, may be achieved by cloning the heterologous polynucleotide of the invention into an expression vector such as, for example, pGAPZ or pGAPZalpha, and growing the yeast culture in the absence of methanol.

[0195] In addition to encompassing host cells containing the vector constructs discussed herein, the invention also encompasses primary, secondary, and immortalized host cells of vertebrate origin, particularly mammalian origin, that have been engineered to delete or replace endogenous genetic material (e.g., coding sequence), and/or to include genetic material (e.g., heterologous polynucleotide sequences) that is operably associated with polynucleotides of the invention, and which activates, alters, and/or amplifies endogenous polynucleotides. For example, techniques known in the art may be used to operably associate heterologous control regions (e.g., promoter and/or enhancer) and endogenous polynucleotide sequences via homologous recombination (see, e.g., U.S. Pat. No. 5,641,670, issued Jun. 24, 1997; International Publication No. WO 96/29411, published Sep. 26, 1996; International Publication No. WO 94/12650, published Aug. 4, 1994; Koller et al., Proc. Natl. Acad. Sci. USA 86:8932-8935 (1989); and Zijlstra et al., Nature 342:435-438 (1989), the disclosures of each of which are incorporated by reference in their entireties).

[0196] In addition, polypeptides of the invention can be chemically synthesized using techniques known in the art (e.g., see Creighton, 1983, Proteins: Structures and Molecular Principles, W. H. Freeman & Co., N.Y., and Hunkapiller et al., Nature, 310:105-111 (1984)). For example, a polypeptide corresponding to a fragment of a polypeptide can be synthesized by use of a peptide synthesizer. Furthermore, if desired, nonclassical amino acids or chemical amino acid analogs can be introduced as a substitution or addition into the polypeptide sequence. Non-classical amino acids include, but are not limited to, to the D-isomers of the common amino acids, 2,4-diaminobutyric acid, a-amino isobutyric acid, 4-aminobutyric acid, Abu, 2-amino butyric acid, g-Abu, e-Ahx, 6-amino hexanoic acid, Aib, 2-amino isobutyric acid, 3-amino propionic acid, ornithine, norleucine, norvaline, hydroxyproline, sarcosine, citrulline, homocitrulline, cysteic acid, t-butylglycine, t-butylalanine, phenylglycine, cyclohexylalanine, b-alanine, fluoro-amino acids, designer amino acids such as b-methyl amino acids, Ca-methyl amino acids, Na-methyl amino acids, and amino acid analogs in general. Furthermore, the amino acid can be D (dextrorotary) or L (levorotary).

[0197] The invention encompasses polypeptides of the present invention which are differentially modified during or after translation, e.g., by glycosylation, acetylation, phosphorylation, amidation, derivatization by known protecting/blocking groups, proteolytic cleavage, linkage to an antibody molecule or other cellular ligand, etc. Any of numerous chemical modifications may be carried out by known techniques, including but not limited, to specific chemical cleavage by cyanogen bromide, trypsin, chymotrypsin, papain, V8 protease, NaBH₄; acetylation, formylation, oxidation, reduction; metabolic synthesis in the presence of tunicamycin; etc.

[0198] Additional post-translational modifications encompassed by the invention include, for example, e.g., N-linked or O-linked carbohydrate chains, processing of N-terminal or C-terminal ends), attachment of chemical moieties to the amino acid backbone, chemical modifications of N-linked or O-linked carbohydrate chains, and addition or deletion of an N-terminal methionine residue as a result of procaryotic host cell expression. The polypeptides may also be modified with a detectable label, such as an enzymatic, fluorescent, isotopic or affinity label to allow for detection and isolation of the protein.

[0199] Examples of suitable enzymes include horseradish peroxidase, alkaline phosphatase, beta-galactosidase, or acetylcholinesterase; examples of suitable prosthetic group complexes include streptavidin/biotin and avidin/biotin; examples of suitable fluorescent materials include umbelliferone, fluorescein, fluorescein isothiocyanate, rhodamine, dichlorotriazinylamine fluorescein, dansyl chloride or phycoerythrin; an example of a luminescent material includes luminol; examples of bioluminescent materials include luciferase, luciferin, and aequorin; and examples of suitable radioactive material include iodine (¹²¹I, ¹²³I, ¹²⁵I, ¹³¹I), carbon (¹⁴C), sulfur (³⁵S), tritium (³H), indium (¹¹¹In, ¹¹²In, ¹¹³ⁿIn, ^{115m}In), technetium (⁹⁹Tc, ^{99m}Tc), thallium (²⁰¹Ti), gallium (⁶⁸Ga, ⁶⁷Ga), palladium (¹⁰³Pd), molybdenum (⁹⁹Mo), xenon (¹³³Xe), fluorine (¹⁸F), ¹⁵³Sm, ¹⁷⁷Lu, ¹⁵⁹Gd, ¹⁴⁹Pm, ¹⁴⁰La, ¹⁷⁵Yb, ¹⁶⁶Ho, ⁹⁰Y, ⁴⁷Sc, ¹⁸⁶Re, ¹⁸⁸Re, ¹⁴²Pr, ¹⁰⁵Rh, and ⁹⁷Ru.

[0200] In specific embodiments, a polypeptide of the present invention or fragment or variant thereof is attached to macrocyclic chelators that associate with radiometal ions, including but not limited to, ¹⁷⁷Lu, ⁹⁰Y, ¹⁶⁶Ho, and ¹⁵³Sm, to polypeptides. In a preferred embodiment, the radiometal ion associated with the macrocyclic chelators is ¹¹¹In. In another preferred embodiment, the radiometal ion associated with the macrocyclic chelator is ⁹⁰Y. In specific embodiments, the macrocyclic chelator is 1,4,7,10-tetraazacyclododecane-N,N′,N″,N′″-tetraacetic acid (DOTA). In other specific embodiments, DOTA is attached to an antibody of the invention or fragment thereof via a linker molecule. Examples of linker molecules useful for conjugating DOTA to a polypeptide are commonly known in the art—see, for example, DeNardo et al., Clin Cancer Res. 4(10):2483-90 (1998); Peterson et al., Bioconjug. Chem. 10(4):553-7 (1999); and Zimmerman et al, Nucl. Med. Biol. 26(8):943-50 (1999); which are hereby incorporated by reference in their entirety.

[0201] As mentioned, the ovarian and/or breast associated proteins of the invention may be modified by either natural processes, such as posttranslational processing, or by chemical modification techniques which are well known in the art. It will be appreciated that the same type of modification may be present in the same or varying degrees at several sites in a given ovarian and/or breast associated polypeptide. Ovarian and/or breast associated polypeptides may be branched, for example, as a result of ubiquitination, and they may be cyclic, with or without branching. Cyclic, branched, and branched cyclic ovarian and/or breast associated polypeptides may result from posttranslation natural processes or may be made by synthetic methods. Modifications include acetylation, acylation, ADP-ribosylation, amidation, covalent attachment of flavin, covalent attachment of a heme moiety, covalent attachment of a nucleotide or nucleotide derivative, covalent attachment of a lipid or lipid derivative, covalent attachment of phosphotidylinositol, cross-linking, cyclization, disulfide bond formation, demethylation, formation of covalent cross-links, formation of cysteine, formation of pyroglutamate, formylation, gamma-carboxylation, glycosylation, GPI anchor formation, hydroxylation, iodination, methylation, myristoylation, oxidation, pegylation, proteolytic processing, phosphorylation, prenylation, racemization, selenoylation, sulfation, transfer-RNA mediated addition of amino acids to proteins such as arginylation, and ubiquitination. (See, for instance, PROTEINS—STRUCTURE AND MOLECULAR PROPERTIES, 2nd Ed., T. E. Creighton, W. H. Freeman and Company, New York (1993); POSTTRANSLATIONAL COVALENT MODIFICATION OF PROTEINS, B. C. Johnson, Ed., Academic Press, New York, pgs. 1-12 (1983); Seifter et al., Meth. Enzymol. 182:626-646 (1990); Rattan et al., Ann. N.Y. Acad. Sci. 663:48-62 (1992)).

[0202] Also provided by the invention are chemically modified derivatives of the polypeptides of the invention which may provide additional advantages such as increased solubility, stability and circulating time of the polypeptide, or decreased immunogenicity (see U.S. Pat. No. 4,179,337). The chemical moieties for derivitization may be selected from water soluble polymers such as polyethylene glycol, ethylene glycol/propylene glycol copolymers, carboxymethylcellulose, dextran, polyvinyl alcohol and the like. The polypeptides may be modified at random positions within the molecule, or at predetermined positions within the molecule and may include one, two, three or more attached chemical moieties.

[0203] The polymer may be of any molecular weight, and may be branched or unbranched. For polyethylene glycol, the preferred molecular weight is between about 1 kDa and about 100 kDa (the term “about” indicating that in preparations of polyethylene glycol, some molecules will weigh more, some less, than the stated molecular weight) for ease in handling and manufacturing. Other sizes may be used, depending on the desired therapeutic profile (e.g., the duration of sustained release desired, the effects, if any on biological activity, the ease in handling, the degree or lack of antigenicity and other known effects of the polyethylene glycol to a therapeutic protein or analog). For example, the polyethylene glycol may have an average molecular weight of about 200, 500, 1000, 1500, 2000, 2500, 3000, 3500, 4000, 4500, 5000, 5500, 6000, 6500, 7000, 7500, 8000, 8500, 9000, 9500, 10,000, 10,500, 11,000, 11,500, 12,000, 12,500, 13,000, 13,500, 14,000, 14,500, 15,000, 15,500, 16,000, 16,500, 17,000, 17,500, 18,000, 18,500, 19,000, 19,500, 20,000, 25,000, 30,000, 35,000, 40,000, 50,000, 55,000, 60,000, 65,000, 70,000, 75,000, 80,000, 85,000, 90,000, 95,000, or 100,000 kDa.

[0204] As noted above, the polyethylene glycol may have a branched structure. Branched polyethylene glycols are described, for example, in U.S. Pat. No. 5,643,575; Morpurgo et al., Appl. Biochem. Biotechnol. 56:59-72 (1996); Vorobjev et al., Nucleosides Nucleotides 18:2745-2750 (1999); and Caliceti et al., Bioconjug. Chem. 10:638-646 (1999), the disclosures of each of which are incorporated herein by reference.

[0205] The polyethylene glycol molecules (or other chemical moieties) should be attached to the protein with consideration of effects on functional or antigenic domains of the protein. There are a number of attachment methods available to those skilled in the art, such as, for example, the method disclosed in EP 0 401 384 (coupling PEG to G-CSF), herein incorporated by reference; see also Malik et al., Exp. Hematol. 20:1028-1035 (1992), reporting pegylation of GM-CSF using tresyl chloride. For example, polyethylene glycol may be covalently bound through amino acid residues via a reactive group, such as a free amino or carboxyl group. Reactive groups are those to which an activated polyethylene glycol molecule may be bound. The amino acid residues having a free amino group may include lysine residues and the N-terminal amino acid residues; those having a free carboxyl group may include aspartic acid residues glutamic acid residues and the C-terminal amino acid residue. Sulfhydryl groups may also be used as a reactive group for attaching the polyethylene glycol molecules. Preferred for therapeutic purposes is attachment at an amino group, such as attachment at the N-terminus or lysine group.

[0206] As suggested above, polyethylene glycol may be attached to proteins via linkage to any of a number of amino acid residues. For example, polyethylene glycol can be linked to proteins via covalent bonds to lysine, histidine, aspartic acid, glutamic acid, or cysteine residues. One or more reaction chemistries may be employed to attach polyethylene glycol to specific amino acid residues (e.g., lysine, histidine, aspartic acid, glutamic acid, or cysteine) of the protein or to more than one type of amino acid residue (e.g., lysine, histidine, aspartic acid, glutamic acid, cysteine and combinations thereof) of the protein.

[0207] One may specifically desire proteins chemically modified at the N-terminus. Using polyethylene glycol as an illustration of the present composition, one may select from a variety of polyethylene glycol molecules (by molecular weight, branching, etc.), the proportion of polyethylene glycol molecules to protein (polypeptide) molecules in the reaction mix, the type of pegylation reaction to be performed, and the method of obtaining the selected N-terminally pegylated protein. The method of obtaining the N-terminally pegylated preparation (i.e., separating this moiety from other monopegylated moieties if necessary) may be by purification of the N-terminally pegylated material from a population of pegylated protein molecules. Selective proteins chemically modified at the N-terminus modification may be accomplished by reductive alkylation which exploits differential reactivity of different types of primary amino groups (lysine versus the N-terminal) available for derivatization in a particular protein. Under the appropriate reaction conditions, substantially selective derivatization of the protein at the N-terminus with a carbonyl group containing polymer is achieved.

[0208] As indicated above, pegylation of the proteins of the invention may be accomplished by any number of means. For example, polyethylene glycol may be attached to the protein either directly or by an intervening linker. Linkerless systems for attaching polyethylene glycol to proteins are described in Delgado et al., Crit. Rev. Thera. Drug Carrier Sys. 9:249-304 (1992); Francis et al., Intern. J. of Hematol. 68:1-18 (1998); U.S. Pat. No. 4,002,531; U.S. Pat. No. 5,349,052; WO 95/06058; and WO 98/32466, the disclosures of each of which are incorporated herein by reference.

[0209] One system for attaching polyethylene glycol directly to amino acid residues of proteins without an intervening linker employs tresylated MPEG, which is produced by the modification of monmethoxy polyethylene glycol (MPEG) using tresylchloride (ClSO₂CH₂CF₃). Upon reaction of protein with tresylated MPEG, polyethylene glycol is directly attached to amine groups of the protein. Thus, the invention includes protein-polyethylene glycol conjugates produced by reacting proteins of the invention with a polyethylene glycol molecule having a 2,2,2-trifluoreothane sulphonyl group.

[0210] Polyethylene glycol can also be attached to proteins using a number of different intervening linkers. For example, U.S. Pat. No. 5,612,460, the entire disclosure of which is incorporated herein by reference, discloses urethane linkers for connecting polyethylene glycol to proteins. Protein-polyethylene glycol conjugates wherein the polyethylene glycol is attached to the protein by a linker can also be produced by reaction of proteins with compounds such as MPEG-succinimidylsuccinate, MPEG activated with 1,1′-carbonyldiimidazole, MPEG-2,4,5-trichloropenylcarbonate, MPEG-p-nitrophenolcarbonate, and various MPEG-succinate derivatives. A number of additional polyethylene glycol derivatives and reaction chemistries for attaching polyethylene glycol to proteins are described in International Publication No. WO 98/32466, the entire disclosure of which is incorporated herein by reference. Pegylated protein products produced using the reaction chemistries set out herein are included within the scope of the invention.

[0211] The number of polyethylene glycol moieties attached to each protein of the invention (i.e., the degree of substitution) may also vary. For example, the pegylated proteins of the invention may be linked, on average, to 1, 2, 3, 4, 5, 6, 7, 8, 9, 10, 12, 15, 17, 20, or more polyethylene glycol molecules. Similarly, the average degree of substitution within ranges such as 1-3,2-4,3-5,4-6,5-7,6-8,7-9,8-10, 9-11, 10-12, 11-13, 12-14, 13-15, 14-16, 15-17, 16-18, 17-19, or 18-20 polyethylene glycol moieties per protein molecule. Methods for determining the degree of substitution are discussed, for example, in Delgado et al., Crit. Rev. Thera. Drug Carrier Sys. 9:249-304 (1992).

[0212] The ovarian and/or breast associated polypeptides of the invention can be recovered and purified from chemical synthesis and recombinant cell cultures by standard methods which include, but are not limited to, ammonium sulfate or ethanol precipitation, acid extraction, anion or cation exchange chromatography, phosphocellulose chromatography, hydrophobic interaction chromatography, affinity chromatography, hydroxylapatite chromatography and lectin chromatography. Most preferably, high performance liquid chromatography (“HPLC”) is employed for purification. Well known techniques for refolding protein may be employed to regenerate active conformation when the polypeptide is denatured during isolation and/or purification.

[0213] Ovarian and/or breast associated polynucleotides and polypeptides may be used in accordance with the present invention for a variety of applications, particularly those that make use of the chemical and biological properties of ovarian and/or breast associated antigens. Among these are applications in the detection, prevention, diagnosis and/or treatment of diseases associated with the ovaries and/or breast, such as e.g., ovarian and/or breast cancer and tumors (e.g., ovarian Krukenberg tumor, malignant mixed Mullerian tumors, and/or as described under “Hyperproliferative Disorders” below), infectious diseases (e.g., mastitis, oophoritis, and/or as described under “Infectious Diseases” below), and inflammatory diseases (e.g., abcesses and/or as described under “Immune Disorders” below), and as described under “Reproductive System Disorders” below. Additional applications relate to diagnosis and to treatment of disorders of cells, tissues and organisms. These aspects of the invention are discussed further below.

[0214] In a preferred embodiment, polynucleotides expressed in a particular tissue type (see, e.g., Table 1A, column 7) are used to detect, diagnose, treat, prevent and/or prognose disorders associated with the tissue type.

[0215] The polypeptides of the invention may be in monomers or multimers (i.e., dimers, trimers, tetramers and higher multimers). Accordingly, the present invention relates to monomers and multimers of the polypeptides of the invention, their preparation, and compositions (preferably, Therapeutics) containing them. In specific embodiments, the polypeptides of the invention are monomers, dimers, trimers or tetramers. In additional embodiments, the multimers of the invention are at least dimers, at least trimers, or at least tetramers.

[0216] Multimers encompassed by the invention may be homomers or heteromers. As used herein, the term homomer refers to a multimer containing only polypeptides corresponding to a protein of the invention (e.g., the amino acid sequence of SEQ ID NO:Y, an amino acid sequence encoded by SEQ ID NO:X or the complement of SEQ ID NO:X, the amino acid sequence encoded by the portion of SEQ ID NO:X as defined in columns 8 and 9 of Table 2, and/or an amino acid sequence encoded by cDNA contained in Clone ID NO:Z (including fragments, variants, splice variants, and fusion proteins, corresponding to these as described herein)). These homomers may contain polypeptides having identical or different amino acid sequences. In a specific embodiment, a homomer of the invention is a multimer containing only polypeptides having an identical amino acid sequence. In another specific embodiment, a homomer of the invention is a multimer containing polypeptides having different amino acid sequences. In specific embodiments, the multimer of the invention is a homodimer (e.g., containing two polypeptides having identical or different amino acid sequences) or a homotrimer (e.g., containing three polypeptides having identical and/or different amino acid sequences). In additional embodiments, the homomeric multimer of the invention is at least a homodimer, at least a homotrimer, or at least a homotetramer.

[0217] As used herein, the term heteromer refers to a multimer containing two or more heterologous polypeptides (i.e., polypeptides of different proteins) in addition to the polypeptides of the invention. In a specific embodiment, the multimer of the invention is a heterodimer, a heterotrimer, or a heterotetramer. In additional embodiments, the heteromeric multimer of the invention is at least a heterodimer, at least a heterotrimer, or at least a heterotetramer.

[0218] Multimers of the invention may be the result of hydrophobic, hydrophilic, ionic and/or covalent associations and/or may be indirectly linked by, for example, liposome formation. Thus, in one embodiment, multimers of the invention, such as, for example, homodimers or homotrimers, are formed when polypeptides of the invention contact one another in solution. In another embodiment, heteromultimers of the invention, such as, for example, heterotrimers or heterotetramers, are formed when polypeptides of the invention contact antibodies to the polypeptides of the invention (including antibodies to the heterologous polypeptide sequence in a fusion protein of the invention) in solution. In other embodiments, multimers of the invention are formed by covalent associations with and/or between the polypeptides of the invention. Such covalent associations may involve one or more amino acid residues contained in the polypeptide sequence (e.g., that recited in SEQ ID NO:Y, encoded by the portion of SEQ ID NO:X as defined in columns 8 and 9 of Table 2, and/or encoded by the cDNA contained in Clone ID NO:Z). In one instance, the covalent associations are cross-linking between cysteine residues located within the polypeptide sequences which interact in the native (i.e., naturally occurring) polypeptide. In another instance, the covalent associations are the consequence of chemical or recombinant manipulation. Alternatively, such covalent associations may involve one or more amino acid residues contained in the heterologous polypeptide sequence in a fusion protein. In one example, covalent associations are between the heterologous sequence contained in a fusion protein of the invention (see, e.g., U.S. Pat. No. 5,478,925). In a specific example, the covalent associations are between the heterologous sequence contained in a Fc fusion protein of the invention (as described herein). In another specific example, covalent associations of fusion proteins of the invention are between heterologous polypeptide sequence from another protein that is capable of forming covalently associated multimers, such as for example, osteoprotegerin (see, e.g., International Publication NO: WO 98/49305, the contents of which are herein incorporated by reference in its entirety). In another embodiment, two or more polypeptides of the invention are joined through peptide linkers. Examples include those peptide linkers described in U.S. Pat. No. 5,073,627 (hereby incorporated by reference). Proteins comprising multiple polypeptides of the invention separated by peptide linkers may be produced using conventional recombinant DNA technology.

[0219] Another method for preparing multimer polypeptides of the invention involves use of polypeptides of the invention fused to a leucine zipper or isoleucine zipper polypeptide sequence. Leucine zipper and isoleucine zipper domains are polypeptides that promote multimerization of the proteins in which they are found. Leucine zippers were originally identified in several DNA-binding proteins (Landschulz et al., Science 240:1759, (1988)), and have since been found in a variety of different proteins. Among the known leucine zippers are naturally occurring peptides and derivatives thereof that dimerize or trimerize. Examples of leucine zipper domains suitable for producing soluble multimeric proteins of the invention are those described in PCT application WO 94/10308, hereby incorporated by reference. Recombinant fusion proteins comprising a polypeptide of the invention fused to a polypeptide sequence that dimerizes or trimerizes in solution are expressed in suitable host cells, and the resulting soluble multimeric fusion protein is recovered from the culture supernatant using techniques known in the art.

[0220] Trimeric polypeptides of the invention may offer the advantage of enhanced biological activity. Preferred leucine zipper moieties and isoleucine moieties are those that preferentially form trimers. One example is a leucine zipper derived from lung surfactant protein D (SPD), as described in Hoppe et al. (FEBS Letters 344:191, (1994)) and in U.S. patent application Ser. No. 08/446,922, hereby incorporated by reference. Other peptides derived from naturally occurring trimeric proteins may be employed in preparing trimeric polypeptides of the invention.

[0221] In another example, proteins of the invention are associated by interactions between Flag® polypeptide sequence contained in fusion proteins of the invention containing Flag® polypeptide sequence. In a further embodiment, proteins of the invention are associated by interactions between heterologous polypeptide sequence contained in Flag® fusion proteins of the invention and anti-Flag® antibody.

[0222] The multimers of the invention may be generated using chemical techniques known in the art. For example, polypeptides desired to be contained in the multimers of the invention may be chemically cross-linked using linker molecules and linker molecule length optimization techniques known in the art (see, e.g., U.S. Pat. No. 5,478,925, which is herein incorporated by reference in its entirety). Additionally, multimers of the invention may be generated using techniques known in the art to form one or more inter-molecule cross-links between the cysteine residues located within the sequence of the polypeptides desired to be contained in the multimer (see, e.g., U.S. Pat. No. 5,478,925, which is herein incorporated by reference in its entirety). Further, polypeptides of the invention may be routinely modified by the addition of cysteine or biotin to the C-terminus or N-terminus of the polypeptide and techniques known in the art may be applied to generate multimers containing one or more of these modified polypeptides (see, e.g., U.S. Pat. No. 5,478,925, which is herein incorporated by reference in its entirety). Additionally, techniques known in the art may be applied to generate liposomes containing the polypeptide components desired to be contained in the multimer of the invention (see, e.g., U.S. Pat. No. 5,478,925, which is herein incorporated by reference in its entirety).

[0223] Alternatively, multimers of the invention may be generated using genetic engineering techniques known in the art. In one embodiment, polypeptides contained in multimers of the invention are produced recombinantly using fusion protein technology described herein or otherwise known in the art (see, e.g., U.S. Pat. No. 5,478,925, which is herein incorporated by reference in its entirety). In a specific embodiment, polynucleotides coding for a homodimer of the invention are generated by ligating a polynucleotide sequence encoding a polypeptide of the invention to a sequence encoding a linker polypeptide and then further to a synthetic polynucleotide encoding the translated product of the polypeptide in the reverse orientation from the original C-terminus to the N-terminus (lacking the leader sequence) (see, e.g., U.S. Pat. No. 5,478,925, which is herein incorporated by reference in its entirety). In another embodiment, recombinant techniques described herein or otherwise known in the art are applied to generate recombinant polypeptides of the invention which contain a transmembrane domain (or hydrophobic or signal peptide) and which can be incorporated by membrane reconstitution techniques into liposomes (see, e.g., U.S. Pat. No. 5,478,925, which is herein incorporated by reference in its entirety).

[0224] Antibodies

[0225] Further polypeptides of the invention relate to antibodies and T-cell antigen receptors (TCR) which immunospecifically bind a polypeptide, polypeptide fragment, or variant of the invention (e.g., a polypeptide or fragment or variant of the amino acid sequence of SEQ ID NO:Y or a polypeptide encoded by the cDNA contained in Clone ID NO:Z, and/or an epitope, of the present invention) as determined by immunoassays well known in the art for assaying specific antibody-antigen binding. Antibodies of the invention include, but are not limited to, polyclonal, monoclonal, multispecific, human, humanized or chimeric antibodies, single chain antibodies, Fab fragments, F(ab′) fragments, fragments produced by a Fab expression library, anti-idiotypic (anti-Id) antibodies (including, e.g., anti-Id antibodies to antibodies of the invention), intracellularly-made antibodies (i.e., intrabodies), and epitope-binding fragments of any of the above. The term “antibody,” as used herein, refers to immunoglobulin molecules and immunologically active portions of immunoglobulin molecules, i.e., molecules that contain an antigen binding site that immunospecifically binds an antigen. The immunoglobulin molecules of the invention can be of any type (e.g., IgG, IgE, IgM, IgD, IgA and IgY), class (e.g., IgG1, IgG2, IgG3, IgG4, IgA1 and IgA2) or subclass of immunoglobulin molecule. In preferred embodiments, the immunoglobulin molecules of the invention are IgG1. In other preferred embodiments, the immunoglobulin molecules of the invention are IgG4.

[0226] Most preferably the antibodies are human antigen-binding antibody fragments of the present invention and include, but are not limited to, Fab, Fab′ and F(ab′)2, Fd, single-chain Fvs (scFv), single-chain antibodies, disulfide-linked Fvs (sdFv) and fragments comprising either a VL or VH domain. Antigen-binding antibody fragments, including single-chain antibodies, may comprise the variable region(s) alone or in combination with the entirety or a portion of the following: hinge-region, CH1, CH2, and CH3 domains. Also included in the invention are antigen-binding fragments also comprising any combination of variable region(s) with a hinge region, CH1, CH2, and CH3 domains. The antibodies of the invention may be from any animal origin including birds and mammals. Preferably, the antibodies are human, murine (e.g., mouse and rat), donkey, ship rabbit, goat, guinea pig, camel, horse, or chicken. As used herein, “human” antibodies include antibodies having the amino acid sequence of a human immunoglobulin and include antibodies isolated from human immunoglobulin libraries or from animals transgenic for one or more human immunoglobulin and that do not express endogenous immunoglobulins, as described infra and, for example in, U.S. Pat. No. 5,939,598 by Kucherlapati et al.

[0227] The antibodies of the present invention may be monospecific, bispecific, trispecific or of greater multispecificity. Multispecific antibodies may be specific for different epitopes of a polypeptide of the present invention or may be specific for both a polypeptide of the present invention as well as for a heterologous epitope, such as a heterologous polypeptide or solid support material. See, e.g., PCT publications WO 93/17715; WO 92/08802; WO 91/00360; WO 92/05793; Tutt, et al., J. Immunol. 147:60-69 (1991); U.S. Pat. Nos. 4,474,893; 4,714,681; 4,925,648; 5,573,920; 5,601,819; Kostelny et al., J. Immunol. 148:1547-1553 (1992).

[0228] Antibodies of the present invention may be described or specified in terms of the epitope(s) or portion(s) of a polypeptide of the present invention which they recognize or specifically bind. The epitope(s) or polypeptide portion(s) may be specified as described herein, e.g., by N-terminal and C-terminal positions, or by size in contiguous amino acid residues, or listed in the Tables and Figures. Preferred epitopes of the invention include those shown in column 6 of Table 1A, as well as polynucleotides that encode these epitopes. Antibodies which specifically bind any epitope or polypeptide of the present invention may also be excluded. Therefore, the present invention includes antibodies that specifically bind polypeptides of the present invention, and allows for the exclusion of the same.

[0229] Antibodies of the present invention may also be described or specified in terms of their cross-reactivity. Antibodies that do not bind any other analog, ortholog, or homolog of a polypeptide of the present invention are included. Antibodies that bind polypeptides with at least 95%, at least 90%, at least 85%, at least 80%, at least 75%, at least 70%, at least 65%, at least 60%, at least 55%, and at least 50% identity (as calculated using methods known in the art and described herein) to a polypeptide of the present invention are also included in the present invention. In specific embodiments, antibodies of the present invention cross-react with murine, rat and/or rabbit homologs of human proteins and the corresponding epitopes thereof. Antibodies that do not bind polypeptides with less than 95%, less than 90%, less than 85%, less than 80%, less than 75%, less than 70%, less than 65%, less than 60%, less than 55%, and less than 50% identity (as calculated using methods known in the art and described herein) to a polypeptide of the present invention are also included in the present invention. In a specific embodiment, the above-described cross-reactivity is with respect to any single specific antigenic or immunogenic polypeptide, or combination(s) of 2, 3, 4, 5, or more of the specific antigenic and/or immunogenic polypeptides disclosed herein. Further included in the present invention are antibodies which bind polypeptides encoded by polynucleotides which hybridize to a polynucleotide of the present invention under stringent hybridization conditions (as described herein). Antibodies of the present invention may also be described or specified in terms of their binding affinity to a polypeptide of the invention. Preferred binding affinities include those with a dissociation constant or Kd less than 5×10⁻² M, 10⁻² M, 5×10⁻³ M, 10⁻³ M, 5×10⁻⁴ M, 10⁻⁴ M, 5×10⁻⁵ M, 10⁻⁵ M, 5×10⁻⁶ M, 10⁻⁶M, 5×10⁻⁷M, 10⁷ M, 5×10⁻⁸ M, 10⁻⁸ M, 5×10⁻⁹ M, 10⁻⁹ M, 5×10⁻¹⁰ M, 10⁻¹⁰M, 5×10⁻¹¹ M, 10⁻¹¹ M, 5×10⁻¹² M, 10⁻¹² M, 5×10⁻¹³ M, 10⁻¹³ M, 5×10⁻¹⁴ M, 10⁻¹⁴ M, 5×10⁻¹⁵ M, or 10⁻¹⁵ M.

[0230] The invention also provides antibodies that competitively inhibit binding of an antibody to an epitope of the invention as determined by any method known in the art for determining competitive binding, for example, the immunoassays described herei-n. In preferred embodiments, the antibody competitively inhibits binding to the epitope by at least 95%, at least 90%, at least 85%, at least 80%, at least 75%, at least 70%, at least 60%, or at least 50%.

[0231] Antibodies of the present invention may act as agonists or antagonists of the polypeptides of the present invention. For example, the present invention includes antibodies which disrupt the receptor/ligand interactions with the polypeptides of the invention either partially or fully. Preferably, antibodies of the present invention bind an antigenic epitope disclosed herein, or a portion thereof. The invention features both receptor-specific antibodies and ligand-specific antibodies. The invention also features receptor-specific antibodies which do not prevent ligand binding but prevent receptor activation. Receptor activation (i.e., signaling) may be determined by techniques described herein or otherwise known in the art. For example, receptor activation can be determined by detecting the phosphorylation (e.g., tyrosine or serine/threonine) of the receptor or its substrate by immunoprecipitation followed by western blot analysis (for example, as described supra). In specific embodiments, antibodies are provided that inhibit ligand activity or receptor activity by at least 95%, at least 90%, at least 85%, at least 80%, at least 75%, at least 70%, at least 60%, or at least 50% of the activity in absence of the antibody.

[0232] The invention also features receptor-specific antibodies which both prevent ligand binding and receptor activation as well as antibodies that recognize the receptor-ligand complex, and, preferably, do not specifically recognize the unbound receptor or the unbound ligand. Likewise, included in the invention are neutralizing antibodies which bind the ligand and prevent binding of the ligand to the receptor, as well as antibodies which bind the ligand, thereby preventing receptor activation, but do not prevent the ligand from binding the receptor. Further included in the invention are antibodies which activate the receptor. These antibodies may act as receptor agonists, i.e., potentiate or activate either all or a subset of the biological activities of the ligand-mediated receptor activation, for example, by inducing dimerization of the receptor. The antibodies may be specified as agonists, antagonists or inverse agonists for biological activities comprising the specific biological activities of the peptides of the invention disclosed herein. The above antibody agonists can be made using methods known in the art. See, e.g., PCT publication WO 96/40281; U.S. Pat. No. 5,811,097; Deng et al., Blood 92(6):1981-1988 (1998); Chen et al., Cancer Res. 58(16):3668-3678 (1998); Harrop et al., J. Immunol. 161(4):1786-1794 (1998); Zhu et al., Cancer Res. 58(15):3209-3214 (1998); Yoon et al., J. Immunol. 160(7):3170-3179 (1998); Prat et al., J. Cell. Sci. 111(Pt2):237-247 (1998); Pitard et al., J. Immunol. Methods 205(2):177-190 (1997); Liautard et al., Cytokine 9(4):233-241 (1997); Carlson et al., J. Biol. Chem. 272(17):11295-11301 (1997); Taryman et al., Neuron 14(4):755-762 (1995); Muller et al., Structure 6(9):1153-1167 (1998); Bartunek et al., Cytokine 8(1):14-20 (1996) (which are all incorporated by reference herein in their entireties).

[0233] Antibodies of the present invention may be used, for example, to purify, detect, and target the polypeptides of the present invention, including both in vitro and in vivo diagnostic and therapeutic methods. For example, the antibodies have utility in immunoassays for qualitatively and quantitatively measuring levels of the polypeptides of the present invention in biological samples. See, e.g., Harlow et al., Antibodies: A Laboratory Manual, (Cold Spring Harbor Laboratory Press, 2nd ed. 1988); incorporated by reference herein in its entirety.

[0234] As discussed in more detail below, the antibodies of the present invention may be used either alone or in combination with other compositions. The antibodies may further be recombinantly fused to a heterologous polypeptide at the N- or C-terminus or chemically conjugated (including covalent and non-covalent conjugations) to polypeptides or other compositions. For example, antibodies of the present invention may be recombinantly fused or conjugated to molecules useful as labels in detection assays and effector molecules such as heterologous polypeptides, drugs, radionuclides, or toxins. See, e.g., PCT publications WO 92/08495; WO 91/14438; WO 89/12624; U.S. Pat. No. 5,314,995; and EP 396,387; the disclosures of which are incorporated herein by reference in their entireties.

[0235] The antibodies of the invention include derivatives that are modified, i.e., by the covalent attachment of any type of molecule to the antibody such that covalent attachment does not prevent the antibody from generating an anti-idiotypic response. For example, but not by way of limitation, the antibody derivatives include antibodies that have been modified, e.g., by glycosylation, acetylation, pegylation, phosphylation, amidation, derivatization by known protecting/blocking groups, proteolytic cleavage, linkage to a cellular ligand or other protein, etc. Any of numerous chemical modifications may be carried out by known techniques, including, but not limited to specific chemical cleavage, acetylation, formylation, metabolic synthesis of tunicamycin, etc. Additionally, the derivative may contain one or more non-classical amino acids.

[0236] The antibodies of the present invention may be generated by any suitable method known in the art. Polyclonal antibodies to an antigen-of-interest can be produced by various procedures well known in the art. For example, a polypeptide of the invention can be administered to various host animals including, but not limited to, rabbits, mice, rats, etc. to induce the production of sera containing polyclonal antibodies specific for the antigen. Various adjuvants may be used to increase the immunological response, depending on the host species, and include but are not limited to, Freund's (complete and incomplete), mineral gels such as aluminum hydroxide, surface active substances such as lysolecithin, pluronic polyols, polyanions, peptides, oil emulsions, keyhole limpet hemocyanins, dinitrophenol, and potentially useful human adjuvants such as BCG (bacille Calmette-Guerin) and corynebacterium parvum. Such adjuvants are also well known in the art.

[0237] Monoclonal antibodies can be prepared using a wide variety of techniques known in the art including the use of hybridoma, recombinant, and phage display technologies, or a combination thereof. For example, monoclonal antibodies can be produced using hybridoma techniques including those known in the art and taught, for example, in Harlow et al., Antibodies: A Laboratory Manual, (Cold Spring Harbor Laboratory Press, 2nd ed. 1988); Hammerling, et al., in: Monoclonal Antibodies and T-Cell Hybridomas 563-681 (Elsevier, N.Y., 1981) (said references incorporated by reference in their entireties). The term “monoclonal antibody” as used herein is not limited to antibodies produced through hybridoma technology. The term “monoclonal antibody” refers to an antibody that is derived from a single clone, including any eukaryotic, prokaryotic, or phage clone, and not the method by which it is produced.

[0238] Methods for producing and screening for specific antibodies using hybridoma technology are routine and well known in the art and are discussed in detail in the Examples. In a non-limiting example, mice can be immunized with a polypeptide of the invention or a cell expressing such peptide. Once an immune response is detected, e.g., antibodies specific for the antigen are detected in the mouse serum, the mouse spleen is harvested and splenocytes isolated. The splenocytes are then fused by well known techniques to any suitable myeloma cells, for example cells from cell line SP20 available from the ATCC. Hybridomas are selected and cloned by limited dilution. The hybridoma clones are then assayed by methods known in the art for cells that secrete antibodies capable of binding a polypeptide of the invention. Ascites fluid, which generally contains high levels of antibodies, can be generated by immunizing mice with positive hybridoma clones.

[0239] Accordingly, the present invention provides methods of generating monoclonal antibodies as well as antibodies produced by the method comprising culturing a hybridoma cell secreting an antibody of the invention wherein, preferably, the hybridoma is generated by fusing splenocytes isolated from a mouse immunized with an antigen of the invention with myeloma cells and then screening the hybridomas resulting from the fusion for hybridoma clones that secrete an antibody able to bind a polypeptide of the invention.

[0240] Another well known method for producing both polyclonal and monoclonal human B cell lines is transformation using Epstein Barr Virus (EBV). Protocols for generating EBV-transformed B cell lines are commonly known in the art, such as, for example, the protocol outlined in Chapter 7.22 of Current Protocols in Immunology, Coligan et al., Eds., 1994, John Wiley & Sons, NY, which is hereby incorporated in its entirety by reference herein. The source of B cells for transformation is commonly human peripheral blood, but B cells for transformation may also be derived from other sources including, but not limited to, lymph nodes, tonsil, spleen, tumor tissue, and infected tissues. Tissues are generally made into single cell suspensions prior to EBV transformation. Additionally, steps may be taken to either physically remove or inactivate T cells (e.g., by treatment with cyclosporin A) in B cell-containing samples, because T cells from individuals seropositive for anti-EBV antibodies can suppress B cell immortalization by EBV.

[0241] In general, the sample containing human B cells is innoculated with EBV, and cultured for 3-4 weeks. A typical source of EBV is the culture supernatant of the B95-8 cell line (ATCC #VR-1492). Physical signs of EBV transformation can generally be seen towards the end of the 3-4 week culture period. By phase-contrast microscopy, transformed cells may appear large, clear, hairy and tend to aggregate in tight clusters of cells. Initially, EBV lines are generally polyclonal. However, over prolonged periods of cell cultures, EBV lines may become monoclonal or polyclonal as a result of the selective outgrowth of particular B cell clones. Alternatively, polyclonal EBV transformed lines may be subcloned (e.g., by limiting dilution culture) or fused with a suitable fusion partner and plated at limiting dilution to obtain monoclonal B cell lines. Suitable fusion partners for EBV transformed cell lines include mouse myeloma cell lines (e.g., SP2/0, X63-Ag8.653), heteromyeloma cell lines (human x mouse; e.g, SPAM-8, SBC-H20, and CB-F7), and human cell lines (e.g., GM 1500, SKO-007, RPMI 8226, and KR-4). Thus, the present invention also provides a method of generating polyclonal or monoclonal human antibodies against polypeptides of the invention or fragments thereof, comprising EBV-transformation of human B cells.

[0242] Antibody fragments which recognize specific epitopes may be generated by known techniques. For example, Fab and F(ab′)2 fragments of the invention may be produced by proteolytic cleavage of immunoglobulin molecules, using enzymes such as papain (to produce Fab fragments) or pepsin (to produce F(ab′)2 fragments). F(ab′)2 fragments contain the variable region, the light chain constant region and the CH1 domain of the heavy chain. For example, the antibodies of the present invention can also be generated using various phage display methods known in the art and as discussed in detail in the Examples (e.g., Example 10). In phage display methods, functional antibody domains are displayed on the surface of phage particles which carry the polynucleotide sequences encoding them. In a particular embodiment, such phage can be utilized to display antigen binding domains expressed-from a repertoire or combinatorial antibody library (e.g., human or murine). Phage expressing an antigen binding domain that binds the antigen of interest can be selected or identified with antigen, e.g., using labeled antigen or antigen bound or captured to a solid surface or bead. Phage used in these methods are typically filamentous phage including fd and M13 binding domains expressed from phage with Fab, Fv or disulfide stabilized Fv antibody domains recombinantly fused to either the phage gene III or gene VIII protein. Examples of phage display methods that can be used to make the antibodies of the present invention include those disclosed in Brinkman et al., J. Immunol. Methods 182:41-50 (1995); Ames et al., J. Immunol. Methods 184:177-186 (1995); Kettleborough et al., Eur. J. Immunol. 24:952-958 (1994); Persic et al., Gene 187 9-18 (1997); Burton et al., Advances in Immunology 57:191-280 (1994); PCT application No. PCT/GB91/01134; PCT publications WO 90/02809; WO 91/10737; WO 92/01047; WO 92/18619; WO 93/11236; WO 95/15982; WO 95/20401; and U.S. Pat. Nos. 5,698,426; 5,223,409; 5,403,484; 5,580,717; 5,427,908; 5,750,753; 5,821,047; 5,571,698; 5,427,908; 5,516,637; 5,780,225; 5,658,727; 5,733,743 and 5,969,108; each of which is incorporated herein by reference in its entirety.

[0243] As described in the above references, after phage selection, the antibody coding regions from the phage can be isolated and used to generate whole antibodies, including human antibodies, or any other desired antigen binding fragment, and expressed in any desired host, including mammalian cells, insect cells, plant cells, yeast, and bacteria, e.g., as described in detail below. For example, techniques to recombinantly produce Fab, Fab′ and F(ab′)₂ fragments can also be employed using methods known in the art such as those disclosed in PCT publication WO 92/22324; Mullinax et al., BioTechniques 12(6):864-869 (1992); and Sawai et al., AJRI 34:26-34 (1995); and Better et al., Science 240:1041-1043 (1988) (said references incorporated by reference in their entireties).

[0244] Examples of techniques which can be used to produce single-chain Fvs and antibodies include those described in U.S. Pat. Nos. 4,946,778 and 5,258,498; Huston et al., Methods in Enzymology 203:46-88 (1991); Shu et al., PNAS 90:7995-7999 (1993); and Skerra et al., Science 240:1038-1040 (1988). For some uses, including in vivo use of antibodies in humans and in vitro detection assays, it may be preferable to use chimeric, humanized, or human antibodies. A chimeric antibody is a molecule in which different portions of the antibody are derived from different animal species, such as antibodies having a variable region derived from a murine monoclonal antibody and a human immunoglobulin constant region. Methods for producing chimeric antibodies are known in the art. See e.g., Morrison, Science 229:1202 (1985); Oi et al., BioTechniques 4:214 (1986); Gillies et al., (1989) J. Immunol. Methods 125:191-202; U.S. Pat. Nos. 5,807,715; 4,816,567; and 4,816397, which are incorporated herein by reference in their entirety. Humanized antibodies are antibody molecules from non-human species antibody that binds the desired antigen having one or more complementarity determining regions (CDRs) from the non-human species and a framework regions from a human immunoglobulin molecule. Often, framework residues in the human framework regions will be substituted with the corresponding residue from the CDR donor antibody to alter, preferably improve, antigen binding. These framework substitutions are identified by methods well known in the art, e.g., by modeling of the interactions of the CDR and framework residues to identify framework residues important for antigen binding and sequence comparison to identify unusual framework residues at particular positions. (See, e.g., Queen et al., U.S. Pat. No. 5,585,089; Riechmann et al., Nature 332:323 (1988), which are incorporated herein by reference in their entireties.) Antibodies can be humanized using a variety of techniques known in the art including, for example, CDR-grafting (EP 239,400; PCT publication WO 91/09967; U.S. Pat. Nos. 5,225,539; 5,530,101; and 5,585,089), veneering or resurfacing (EP 592,106; EP 519,596; Padlan, Molecular Immunology 28(4/5):489-498 (1991); Studnicka et al., Protein Engineering 7(6):805-814 (1994); Roguska. et al., PNAS 91:969-973 (1994)), and chain shuffling (U.S. Pat. No. 5,565,332).

[0245] Completely human antibodies are particularly desirable for therapeutic treatment of human patients. Human antibodies can be made by a variety of methods known in the art including phage display methods described above using antibody libraries derived from human immunoglobulin sequences. See also, U.S. Pat. Nos. 4,444,887 and 4,716,111; and PCT publications WO 98/46645, WO 98/50433, WO 98/24893, WO 98/16654, WO 96/34096, WO 96/33735, and WO 91/10741; each of which is incorporated herein by reference in its entirety.

[0246] Human antibodies can also be produced using transgenic mice which are incapable of expressing functional endogenous immunoglobulins, but which can express human immunoglobulin genes. For example, the human heavy and light chain immunoglobulin gene complexes may be introduced randomly or by homologous recombination into mouse embryonic stem cells. Alternatively, the human variable region, constant region, and diversity region may be introduced into mouse embryonic stem cells in addition to the human heavy and light chain genes. The mouse heavy and light chain immunoglobulin genes may be rendered non-functional separately or simultaneously with the introduction of human immunoglobulin loci by homologous recombination. In particular, homozygous deletion of the JH region prevents endogenous antibody production. The modified embryonic stem cells are expanded and microinjected into blastocysts to produce chimeric mice. The chimeric mice are then bred to produce homozygous offspring which express human antibodies. The transgenic mice are immunized in the normal fashion with a selected antigen, e.g., all or a portion of a polypeptide of the invention. Monoclonal antibodies directed against the antigen can be obtained from the immunized, transgenic mice using conventional hybridoma technology. The human immunoglobulin transgenes harbored by the transgenic mice rearrange during B cell differentiation, and subsequently undergo class switching and somatic mutation. Thus, using such a technique, it is possible to produce therapeutically useful IgG, IgA, IgM and IgE antibodies. For an overview of this technology for producing human antibodies, see Lonberg and Huszar, Int. Rev. Immunol. 13:65-93 (1995). For a detailed discussion of this technology for producing human antibodies and human monoclonal antibodies and protocols for producing such antibodies, see, e.g., PCT publications WO 98/24893; WO 92/01047; WO 96/34096; WO 96/33735; European Patent No. 0 598 877; U.S. Pat. Nos. 5,413,923; 5,625,126; 5,633,425; 5,569,825; 5,661,016; 5,545,806; 5,814,318; 5,885,793; 5,916,771; 5,939,598; 6,075,181 and 6,114,598, which are incorporated by reference herein in their entirety. In addition, companies such as Abgenix, Inc. (Freemont, Calif.) and Genpharm (San Jose, Calif.) can be engaged to provide human antibodies directed against a selected antigen using technology similar to that described above.

[0247] Completely human antibodies which recognize a selected epitope can be generated using a technique referred to as “guided selection.” In this approach a selected non-human monoclonal antibody, e.g., a mouse antibody, is used to guide the selection of a completely human antibody recognizing the same epitope. (Jespers et al., Bio/technology 12:899-903 (1988)). 02341 Further, antibodies to the polypeptides of the invention can, in turn, be utilized to generate anti-idiotype antibodies that “mimic” polypeptides of the invention using techniques well known to those skilled in the art. (See, e.g., Greenspan & Bona, FASEB J. 7(5):437-444; (1989) and Nissinoff, J. Immunol. 147(8):2429-2438 (1991)). For example, antibodies which bind to and competitively inhibit polypeptide multimerization and/or binding of a polypeptide of the invention to a ligand can be used to generate anti-idiotypes that “mimic” the polypeptide multimerization and/or binding domain and, as a consequence, bind to and neutralize polypeptide and/or its ligand. Such neutralizing anti-idiotypes or Fab fragments of such anti-idiotypes can be used in therapeutic regimens to neutralize polypeptide ligand/receptor. For example, such anti-idiotypic antibodies can be used to bind a polypeptide of the invention and/or to bind its ligand(s)/receptor(s), and thereby block its biological activity. Alternatively, antibodies which bind to and enhance polypeptide multimerization and/or binding, and/or receptor/ligand multimerization, binding and/or signaling can be used to generate anti-idiotypes that function as agonists of a polypeptide of the invention and/or its ligand/receptor. Such agonistic anti-idiotypes or Fab fragments of such anti-idiotypes can be used in therapeutic regimens as agonists of the polypeptides of the invention or its ligand(s)/receptor(s). For example, such anti-idiotypic antibodies can be used to bind a polypeptide of the invention and/or to bind its ligand(s)/receptor(s), and thereby promote or enhance its biological activity.

[0248] Intrabodies of the invention can be produced using methods known in the art, such as those disclosed and reviewed in Chen et al., Hum. Gene Ther. 5:595-601 (1994); Marasco, W. A., Gene Ther. 4:11-15 (1997); Rondon and Marasco, Annu. Rev. Microbiol. 51:257-283 (1997); Proba et al., J. Mol. Biol. 275:245-253 (1998); Cohen et al., Oncogene 17:2445-2456 (1998); Ohage and Steipe, J. Mol. Biol. 291:1119-1128 (1999); Ohage et al., J. Mol. Biol. 291:1129-1134 (1999); Wirtz and Steipe,-Protein Sci. 8:2245-2250 (1999); Zhu et al., J. Immunol. Methods 231:207-222 (1999); and references cited therein.

[0249] Polynucleotides Encoding Antibodies

[0250] The invention further provides polynucleotides comprising a nucleotide sequence encoding an antibody of the invention and fragments thereof. The invention also encompasses polynucleotides that hybridize under stringent or alternatively, under lower stringency hybridization conditions, e.g., as defined supra, to polynucleotides that encode an antibody, preferably, that specifically binds to a polypeptide of the invention, preferably, an antibody that binds to a polypeptide having the amino acid sequence of SEQ ID NO:Y, to a polypeptide encoded by a portion of SEQ ID NO:X as defined in columns 8 and 9 of Table 2, and/or to a polypeptide encoded by the cDNA contained in Clone ID NO:Z.

[0251] The polynucleotides may be obtained, and the nucleotide sequence of the polynucleotides determined, by any method known in the art. For example, if the nucleotide sequence of the antibody is known, a polynucleotide encoding the antibody may be assembled from chemically synthesized oligonucleotides (e.g., as described in Kutmeier et al., BioTechniques 17:242 (1994)), which, briefly, involves the synthesis of overlapping oligonucleotides containing portions of the sequence encoding the antibody, annealing and ligating of those oligonucleotides, and then amplification of the ligated oligonucleotides by PCR.

[0252] Alternatively, a polynucleotide encoding an antibody may be generated from nucleic acid from a suitable source. If a clone containing a nucleic acid encoding a particular antibody is not available, but the sequence of the antibody molecule is known, a nucleic acid encoding the immunoglobulin may be chemically synthesized or obtained from a suitable source (e.g., an antibody cDNA library, or a cDNA library generated from, or nucleic acid, preferably poly A+ RNA, isolated from, any tissue or cells expressing the antibody, such as hybridoma cells selected to express an antibody of the invention) by PCR amplification using synthetic primers hybridizable to the 3′ and 5′ ends of the sequence or by cloning using an oligonucleotide probe specific for the particular gene sequence to identify, e.g., a cDNA clone from a cDNA library that encodes the antibody. Amplified nucleic acids generated by PCR may then be cloned into replicable cloning vectors using any method well known in the art.

[0253] Once the nucleotide sequence and corresponding amino acid sequence of the antibody is determined, the nucleotide sequence of the antibody may be manipulated using methods well known in the art for the manipulation of nucleotide sequences, e.g., recombinant DNA techniques, site directed mutagenesis, PCR, etc. (see, for example, the techniques described in Sambrook et al., 1990, Molecular Cloning, A Laboratory Manual, 2d Ed., Cold Spring Harbor Laboratory, Cold Spring Harbor, N.Y. and Ausubel et al., eds., 1998, Current Protocols in Molecular Biology, John Wiley & Sons, NY, which are both incorporated by reference herein in their entireties), to generate antibodies having a different amino acid sequence, for example to create amino acid substitutions, deletions, and/or insertions.

[0254] In a specific embodiment, the amino acid sequence of the heavy and/or light chain variable domains may be inspected to identify the sequences of the complementarity determining regions (CDRs) by methods that are well know in the art, e.g., by comparison to known amino acid sequences of other heavy and light chain variable regions to determine the regions of sequence hypervariability. Using routine recombinant DNA techniques, one or more of the CDRs may be inserted within framework regions, e.g., into human framework regions to humanize a non-human antibody, as described supra. The framework regions may be naturally occurring or consensus framework regions, and preferably human framework regions (see, e.g., Chothia et al., J. Mol. Biol. 278: 457-479 (1998) for a listing of human framework regions). Preferably, the polynucleotide generated by the combination of the framework regions and CDRs encodes an antibody that specifically binds a polypeptide of the invention. Preferably, as discussed supra, one or more amino acid substitutions may be made within the framework regions, and, preferably, the amino acid substitutions improve binding of the antibody to its antigen. Additionally, such methods may be used to make amino acid substitutions or deletions of one or more variable region cysteine residues participating in an intrachain disulfide bond to generate antibody molecules lacking one or more intrachain disulfide bonds. Other alterations to the polynucleotide are encompassed by the present invention and within the skill of the art.

[0255] In addition, techniques developed for the production of “chimeric antibodies” (Morrison et al., Proc. Natl. Acad. Sci. 81:851-855 (1984); Neuberger et al., Nature 312:604-608 (1984); Takeda et al., Nature 314:452-454 (1985)) by splicing genes from a mouse antibody molecule of appropriate antigen specificity together with genes from a human antibody molecule of appropriate biological activity can be used. As described supra, a chimeric antibody is a molecule in which different portions are derived from different animal species, such as those having a variable region derived from a murine mAb and a human immunoglobulin constant region, e.g., humanized antibodies.

[0256] Alternatively, techniques described for the production of single chain antibodies (U.S. Pat. No. 4,946,778; Bird, Science 242:423-42 (1988); Huston et al., Proc. Natl. Acad. Sci. USA 85:5879-5883 (1988); and Ward et al., Nature 334:544-54 (1989)) can be adapted to produce single chain antibodies. Single chain antibodies are formed by linking the heavy and light chain fragments of the Fv region via an amino acid bridge, resulting in a single chain polypeptide. Techniques for the assembly of functional Fv fragments in E. coli may also be used (Skerra et al., Science 242:1038-1041 (1988)).

[0257] Methods of Producing Antibodies

[0258] The antibodies of the invention can be produced by any method known in the art for the synthesis of antibodies, in particular, by chemical synthesis or preferably, by recombinant expression techniques. Methods of producing antibodies include, but are not limited to, hybridoma technology, EBV transformation, and other methods discussed herein as well as through the use recombinant DNA technology, as discussed below.

[0259] Recombinant expression of an antibody of the invention, or fragment, derivative or analog thereof, (e.g., a heavy or light chain of an antibody of the invention or a single chain antibody of the invention), requires construction of an expression vector containing a polynucleotide that encodes the antibody. Once a polynucleotide encoding an antibody molecule or a heavy or light chain of an antibody, or portion thereof (preferably containing the heavy or light chain variable domain), of the invention has been obtained, the vector for the production of the antibody molecule may be produced by recombinant DNA technology using techniques well known in the art. Thus, methods for preparing a protein by expressing a polynucleotide containing an antibody encoding nucleotide sequence are described herein. Methods which are well known to those skilled in the art can be used to construct expression vectors containing antibody coding sequences and appropriate transcriptional and translational control signals. These methods include, for example, in vitro recombinant DNA techniques, synthetic techniques, and in vivo genetic recombination. The invention, thus, provides replicable vectors comprising a nucleotide sequence encoding an antibody molecule of the invention, or a heavy or light chain thereof, or a heavy or light chain variable domain, operably linked to a promoter. Such vectors may include the nucleotide sequence encoding the constant region of the antibody molecule (see, e.g., PCT Publication WO 86/05807; PCT Publication WO 89101036; and U.S. Pat. No. 5,122,464) and the variable domain of the antibody may be cloned into such a vector for expression of the entire heavy or light chain.

[0260] The expression vector is transferred to a host cell by conventional techniques and the transfected cells are then cultured by conventional techniques to produce an antibody of the invention. Thus, the invention includes host cells containing a polynucleotide encoding an antibody of the invention, or a heavy or light chain thereof, or a single chain antibody of the invention, operably linked to a heterologous promoter. In preferred embodiments for the expression of double-chained antibodies, vectors encoding both the heavy and light chains may be co-expressed in the host cell for expression of the entire immunoglobulin molecule, as detailed below.

[0261] A variety of host-expression vector systems may be utilized to express the antibody molecules of the invention. Such host-expression systems represent vehicles by which the coding sequences of interest may be produced and subsequently purified, but also represent cells which may, when transformed or transfected with the appropriate nucleotide coding sequences, express an antibody molecule of the invention in situ. These include but are not limited to microorganisms such as bacteria (e.g., E. coli, B. subtilis) transformed with recombinant bacteriophage DNA, plasmid DNA or cosmid DNA expression vectors containing antibody coding sequences; yeast (e.g., Saccharomyces, Pichia) transformed with recombinant yeast expression vectors containing antibody coding sequences; insect cell systems infected with recombinant virus expression vectors (e.g., baculovirus) containing antibody coding sequences; plant cell systems infected with recombinant virus expression vectors (e.g., cauliflower mosaic virus, CaMV; tobacco mosaic virus, TMV) or transformed with recombinant plasmid expression vectors (e.g., Ti plasmid) containing antibody coding sequences; or mammalian cell systems (e.g., COS, CHO, BHK, 293, 3T3 cells) harboring recombinant expression constructs containing promoters derived from the genome of mammalian cells (e.g., metallothionein promoter) or from mammalian viruses (e.g., the adenovirus late promoter; the vaccinia virus 7.5K promoter). Preferably, bacterial cells such as Escherichia coli, and more preferably, eukaryotic cells, especially for the expression of whole recombinant antibody molecule, are used for the expression of a recombinant antibody molecule. For example, mammalian cells such as Chinese hamster ovary cells (CHO), in conjunction with a vector such as the major intermediate early gene promoter element from human cytomegalovirus is an effective expression system for antibodies (Foecking et al., Gene 45:101 (1986); Cockett et al., Bio/Technology 8:2 (1990)).

[0262] In bacterial systems, a number of expression vectors may be advantageously selected depending upon the use intended for the antibody molecule being expressed. For example, when a large quantity of such a protein is to be produced, for the generation of pharmaceutical compositions of an antibody molecule, vectors which direct the expression of high levels of fusion protein products that are readily purified may be desirable. Such vectors include, but are not limited, to the E. coli expression vector pUR278 (Ruther et al., EMBO J. 2:1791 (1983)), in which the antibody coding sequence may be ligated individually into the vector in frame with the lac Z coding region so that a fusion protein is produced; pIN vectors (Inouye & Inouye, Nucleic Acids Res. 13:3101-3109 (1985); Van Heeke & Schuster, J. Biol. Chem. 24:5503-5509 (1989)); and the like. pGEX vectors may also be used to-express foreign polypeptides as fusion proteins with glutathione S-transferase (GST). In general, such fusion proteins are soluble and can easily be purified from lysed cells by adsorption and binding to matrix glutathione-agarose beads followed by elution in the presence of free glutathione. The pGEX vectors are designed to include thrombin or factor Xa protease cleavage sites so that the cloned target gene product can be released from the GST moiety.

[0263] In an insect system, Autographa californica nuclear polyhedrosis virus (AcNPV) is used as a vector to express foreign genes. The virus grows in Spodoptera frugiperda cells. The antibody coding sequence may be cloned individually into non-essential regions (for example the polyhedrin gene) of the virus and placed under control of an AcNPV promoter (for example the polyhedrin promoter).

[0264] In mammalian host cells, a number of viral-based expression systems may be utilized. In cases where an adenovirus is used as an expression vector, the antibody coding sequence of interest may be ligated to an adenovirus transcription/translation control complex, e.g., the late promoter and tripartite leader sequence. This chimeric gene may then be inserted in the adenovirus genome by in vitro or in vivo recombination. Insertion in a non-essential region of the viral genome (e.g., region E1 or E3) will result in a recombinant virus that is viable and capable of expressing the antibody molecule in infected hosts. (e.g., see Logan & Shenk, Proc. Natl. Acad. Sci. USA 81:355-359 (1984)). Specific initiation signals may also be required for efficient translation of inserted antibody coding sequences. These signals include the ATG initiation codon and adjacent sequences. Furthermore, the initiation codon must be in phase with the reading frame of the desired coding sequence to ensure translation of the entire insert. These exogenous translational control signals and initiation codons can be of a variety of origins, both natural and synthetic. The efficiency of expression may be enhanced by the inclusion of appropriate transcription enhancer elements, transcription terminators, etc. (see Bittner et al., Methods in Enzymol. 153:51-544 (1987)).

[0265] In addition, a host cell strain may be chosen which modulates the expression of the inserted sequences, or modifies and processes the gene product in the specific fashion desired. Such modifications (e.g., glycosylation) and processing (e.g., cleavage) of protein products may be important for the function of the protein. Different host cells have characteristic and specific mechanisms for the post-translational processing and modification of proteins and gene products. Appropriate cell lines or host systems can be chosen to ensure the correct modification and processing of the foreign protein expressed. To this end, eukaryotic host cells which possess the cellular machinery for proper processing of the primary transcript, glycosylation, and phosphorylation of the gene product may be used. Such mammalian host cells include but are not limited to CHO, VERY, BHK, Hela, COS, MDCK, 293, 3T3, WI138, and in particular, breast cancer cell lines such as, for example, BT483, Hs578T, HTB2, BT20 and T47D, and normal mammary gland cell line such as, for example, CRL7030 and Hs578Bst.

[0266] For long-term, high-yield production of recombinant proteins, stable expression is preferred. For example, cell lines which stably express the antibody molecule may be engineered. Rather than using expression vectors which contain viral origins of replication, host cells can be transformed with DNA controlled by appropriate expression control elements (e.g., promoter, enhancer, sequences, transcription terminators, polyadenylation sites, etc.), and a selectable marker. Following the introduction of the foreign DNA, engineered cells may be allowed to grow for 1-2 days in an enriched media, and then are switched to a selective media. The selectable marker in the recombinant plasmid confers resistance to the selection and allows cells to stably integrate the plasmid into their chromosomes and grow to form foci which in turn can be cloned and expanded into cell lines. This method may advantageously be used to engineer cell lines which express the antibody molecule. Such engineered cell lines may be particularly useful in screening and evaluation of compounds that interact directly or indirectly with the antibody molecule.

[0267] A number of selection systems may be used, including but not limited to the herpes simplex virus thymidine kinase (Wigler et al., Cell 11:223 (1977)), hypoxanthine-guanine phosphoribosyltransferase (Szybalska & Szybalski, Proc. Natl. Acad. Sci. USA 48:202 (1992)), and adenine phosphoribosyltransferase (Lowy et al., Cell 22:817 (1980)) genes can be employed in tk-, hgprt- or aprt-cells, respectively. Also, antimetabolite resistance can be used as the basis of selection for the following genes: dhfr, which confers resistance to methotrexate (Wigler et al., Natl. Acad. Sci. USA 77:357 (1980); O'Hare et al., Proc. Natl. Acad. Sci. USA 78:1527 (1981)); gpt, which confers resistance to mycophenolic acid (Mulligan & Berg, Proc. Natl. Acad. Sci. USA 78:2072 (1981)); neo, which confers resistance to the aminoglycoside G-418 Clinical Pharmacy 12:488-505; Wu and Wu, Biotherapy 3:87-95 (1991); Tolstoshev, Ann. Rev. Pharmacol. Toxicol. 32:573-596 (1993); Mulligan, Science 260:926-932 (1993); and Morgan and Anderson, Ann. Rev. Biochem. 62:191-217 (1993); TIB TECH 11(5):155-215 (1993)); and hygro, which confers resistance to hygromycin (Santerre et al., Gene 30:147 (1984)). Methods commonly known in the art of recombinant DNA technology may be routinely applied to select the desired recombinant clone, and such methods are described, for example, in Ausubel et al. (eds.), Current Protocols in Molecular Biology, John Wiley & Sons, NY (1993); Kriegler, Gene Transfer and Expression, A Laboratory Manual, Stockton Press, NY (1990); and in Chapters 12 and 13, Dracopoli et al. (eds), Current Protocols in Human Genetics, John Wiley & Sons, NY (1994); Colberre-Garapin et al., J. Mol. Biol. 150:1 (1981), which are incorporated by reference herein in their entireties.

[0268] The expression levels of an antibody molecule can be increased by vector amplification (for a review, see Bebbington and Hentschel, The use of vectors based on gene amplification for the expression of cloned genes in mammalian cells in DNA cloning, Vol.3. (Academic Press, New York, 1987)). When a marker in the vector system expressing antibody is amplifiable, increase in the level of inhibitor present in culture of host cell will increase the number of copies of the marker gene. Since the amplified region is associated with the antibody gene, production of the antibody will also increase (Crouse et al., Mol. Cell. Biol. 3:257 (1983)).

[0269] Vectors which use glutamine synthase (GS) or DHFR as the selectable markers can be amplified in the presence of the drugs methionine sulphoximine or methotrexate, respectively. An advantage of glutamine synthase based vectors are the availabilty of cell lines (e.g., the murine myeloma cell line, NSO) which are glutamine synthase negative. Glutamine synthase expression systems can also function in glutamine synthase expressing cells (e.g., Chinese Hamster Ovary (CHO) cells) by providing additional inhibitor to prevent the functioning of the endogenous gene. A glutamine synthase expression system and components thereof are detailed in PCT publications: WO87/04462; WO86/05807; WO89/01036; WO89/10404; and WO91/06657 which are incorporated in their entireties by reference herein. Additionally, glutamine synthase expression vectors that may be used according to the present invention are commercially available from suppliers, including, for example Lonza Biologics, Inc. (Portsmouth, N.H.). Expression and production of monoclonal antibodies using a GS expression system in murine myeloma cells is described in Bebbington et al., Bio/technology 10:169(1992) and in Biblia and Robinson Biotechnol. Prog. 11:1 (1995) which are incorporated in their entirities by reference herein.

[0270] The host cell may be co-transfected with two expression vectors of the invention, the first vector encoding a heavy chain derived polypeptide and the second vector encoding a light chain derived polypeptide. The two vectors may contain identical selectable markers which enable equal expression of heavy and light chain polypeptides. Alternatively, a single vector may be used which encodes, and is capable of expressing, both heavy and light chain polypeptides. In such situations, the light chain should be placed before the heavy chain to avoid an excess of toxic free heavy chain (Proudfoot, Nature 322:52 (1986); Kohler, Proc. Natl. Acad. Sci. USA 77:2197 (1980)). The coding sequences for the heavy and light chains may comprise cDNA or genomic DNA.

[0271] Once an antibody molecule of the invention has been produced by an animal, chemically synthesized, or recombinantly expressed, it may be purified by any method known in the art for purification of an immunoglobulin molecule, for example, by chromatography (e.g., ion exchange, affinity, particularly by affinity for the specific antigen after Protein A, and sizing column chromatography), centrifugation, differential solubility, or by any other standard technique for the purification of proteins. In addition, the antibodies of the present invention or fragments thereof can be fused to heterologous polypeptide sequences described herein or otherwise known in the art, to facilitate purification.

[0272] The present invention encompasses antibodies recombinantly fused or chemically conjugated (including both covalently and non-covalently conjugations) to a polypeptide (or portion thereof, preferably at least 10, 20, 30, 40, 50, 60, 70, 80, 90 or 100 amino acids of the polypeptide) of the present invention to generate fusion proteins. The fusion does not necessarily need to be direct, but may occur through linker sequences. The antibodies may be specific for antigens other than polypeptides (or portion thereof, preferably at least 10, 20, 30, 40, 50, 60, 70, 80, 90 or 100 amino acids of the polypeptide) of the present invention. For example, antibodies may be used to target the polypeptides of the present invention to particular cell types, either in vitro or in vivo, by fusing or conjugating the polypeptides of the present invention to antibodies specific for particular cell surface receptors. Antibodies fused or conjugated to the polypeptides of the present invention may also be used in in vitro immunoassays and purification methods using methods known in the art. See e.g., Harbor et al., supra, and PCT publication WO 93/21232; EP 439,095; Naramura et al., Immunol. Lett. 39:91-99 (1994); U.S. Pat. No. 5,474,981; Gillies et al., PNAS 89:1428-1432 (1992); Fell et al., J. Immunol. 146:2446-2452 (1991), which are incorporated by reference in their entireties.

[0273] The present invention further includes compositions comprising the polypeptides of the present invention fused or conjugated to antibody domains other than the variable regions. For example, the polypeptides of the present invention may be fused or conjugated to an antibody Fc region, or portion thereof. The antibody portion fused to a polypeptide of the present invention may comprise the constant region, hinge region, CH1 domain, CH2 domain, and CH3 domain or any combination of whole domains or portions thereof. The polypeptides may also be fused or conjugated to the above antibody portions to form multimers. For example, Fc portions fused to the polypeptides of the present invention can form dimers through disulfide bonding between the Fc portions. Higher multimeric forms can be made by fusing the polypeptides to portions of IgA and IgM. Methods for fusing or conjugating the polypeptides of the present invention to antibody portions are known in the art. See, e.g., U.S. Pat. Nos. 5,336,603; 5,622,929; 5,359,046; 5,349,053; 5,447,851; 5,112,946; EP 307,434; EP 367,166; PCT publications WO 96/04388; WO 91/06570; Ashkenazi et al., Proc. Natl. Acad. Sci. USA 88:10535-10539-(1991); Zheng et al., J. Immunol. 154:5590-5600 (1995); and Vil et al., Proc. Natl. Acad. Sci. USA 89:11337-11341 (1992) (said references incorporated by reference in their entireties).

[0274] As discussed, supra, the polypeptides corresponding to a polypeptide, polypeptide fragment, or a variant of SEQ ID NO:Y may be fused or conjugated to the above antibody portions to increase the in vivo half life of the polypeptides or for use in immunoassays using methods known in the art. Further, the polypeptides corresponding to SEQ ID NO:Y may be fused or conjugated to the above antibody portions to facilitate purification. One reported example describes chimeric proteins consisting of the first two domains of the human CD4-polypeptide and various domains of the constant regions of the heavy or light chains of mammalian immunoglobulins. See EP 394,827; Traunecker et al., Nature 331:84-86 (1988). The polypeptides of the present invention fused or conjugated to an antibody having disulfide-linked dimeric structures (due to the IgG) may also be more efficient in binding and neutralizing other molecules, than the monomeric secreted protein or protein fragment alone. See, for example, Fountoulakis et al., J. Biochem. 270:3958-3964 (1995). In many cases, the Fc part in a fusion protein is beneficial in therapy and diagnosis, and thus can result in, for example, improved pharmacokinetic properties. See, for example, EP A 232,262. Alternatively, deleting the Fc part after the fusion protein has been expressed, detected, and purified, would be desired. For example, the Fc portion may hinder therapy and diagnosis if the fusion protein is used as an antigen for immunizations. In drug discovery, for example, human proteins, such as hIL-5, have been fused with Fc portions for the purpose of high-throughput screening assays to identify antagonists of hIL-5. (See, Bennett et al., J. Molecular Recognition 8:52-58 (1995); Johanson et al., J. Biol. Chem. 270:9459-9471 (1995)).

[0275] Moreover, the antibodies or fragments thereof of the present invention can be fused to marker sequences, such as a peptide to facilitate purification. In preferred embodiments, the marker amino acid sequence is a hexa-histidine peptide, such as the tag provided in a pQE vector (QIAGEN, Inc., 9259 Eton Avenue, Chatsworth, Calif., 91311), among others, many of which are commercially available. As described in Gentz et al., Proc. Natl. Acad. Sci. USA 86:821-824 (1989), for instance, hexa-histidine provides for convenient purification of the fusion protein. Other peptide tags useful for purification include, but are not limited to, the “HA” tag, which corresponds to an epitope derived from the influenza hemagglutinin protein (Wilson et al., Cell 37:767 (1984)) and the “flag” tag.

[0276] The present invention further encompasses antibodies or fragments thereof conjugated to a diagnostic or therapeutic agent. The antibodies can be used diagnostically to, for example, monitor the development or progression of a tumor as part of a clinical testing procedure to, e.g., determine the efficacy of a given treatment regimen. Detection can be facilitated by coupling the antibody to a detectable substance. Examples of detectable substances include various enzymes, prosthetic groups, fluorescent materials, luminescent materials, bioluminescent materials, radioactive materials, positron emitting metals using various positron emission tomographies, and nonradioactive paramagnetic metal ions. The detectable substance may be coupled or conjugated either directly to the antibody (or fragment thereof) or indirectly, through an intermediate (such as, for example, a linker known in the art) using techniques known in the art. See, for example, U.S. Pat. No. 4,741,900 for metal ions which can be conjugated to antibodies for use as diagnostics according to the present invention.

[0277] Further, an antibody or fragment thereof may be conjugated to a therapeutic moiety such as a cytotoxin, e.g., a cytostatic or cytocidal agent, a therapeutic agent or a radioactive metal ion, e.g., alpha-emitters such as, for example, 213Bi. A cytotoxin or cytotoxic agent includes any agent that is detrimental to cells. Examples include paclitaxol, cytochalasin B, gramicidin D, ethidium bromide, emetine, mitomycin, etoposide, tenoposide, vincristine, vinblastine, colchicin, doxorubicin, daunorubicin, dihydroxy anthracin dione, mitoxantrone, mithramycin, actinomycin D, 1-dehydrotestosterone, glucocorticoids, procaine, tetracaine, lidocaine, propranolol, and puromycin and analogs or homologs thereof. Therapeutic agents include, but are not limited to, antimetabolites (e.g., methotrexate, 6-mercaptopurine, 6-thioguanine, cytarabine, 5-fluorouracil decarbazine), alkylating agents (e.g., mechlorethamine, thioepa chlorambucil, melphalan, carmustine (BSNU) and lomustine (CCNU), cyclothosphamide, busulfan, dibromomannitol, streptozotocin, mitomycin C, and cis-dichlorodiamine platinum (II) (DDP) cisplatin), anthracyclines (e.g., daunorubicin (formerly daunomycin) and doxorubicin), antibiotics (e.g., dactinomycin (formerly actinomycin), bleomycin, mithramycin, and anthramycin (AMC)), and anti-mitotic agents (e.g., vincristine and vinblastine).

[0278] The conjugates of the invention can be used for modifying a given biological response, the therapeutic agent or drug moiety is not to be construed as limited to classical chemical therapeutic agents. For example, the drug moiety may be a protein or polypeptide possessing a desired biological activity. Such proteins may include, for example, a toxin such as abrin, ricin A, pseudomonas exotoxin, or diphtheria toxin; a protein such as tumor necrosis factor, a-interferon, β-interferon, nerve growth factor, platelet derived growth factor, tissue plasminogen activator, an apoptotic agent, e.g., TNF-alpha, TNF-beta, AIM I (See, International Publication No. WO 97/33899), AIM II (See, International Publication No. WO 97/34911), Fas Ligand (Takahashi et al., Int. Immunol., 6:1567-1574 (1994)), VEGI (See, International Publication No. WO 99/23105), a thrombotic agent or an anti-angiogenic agent, e.g., angiostatin or endostatin; or, biological response modifiers such as, for example, lymphokines, interleukin-1 (“IL-1”), interleukin-2 (“IL-2”), interleukin-6 (“IL-6”), granulocyte macrophage colony stimulating factor (“GM-CSF”), granulocyte colony stimulating factor (“G-CSF”), or other growth factors.

[0279] Antibodies may also be attached to solid supports, which are particularly useful for immunoassays or purification of the target antigen. Such solid supports include, but are not limited to, glass, cellulose, polyacrylamide, nylon, polystyrene, polyvinyl chloride or polypropylene.

[0280] Techniques for conjugating such therapeutic moiety to antibodies are well known. See, for example., Arnon et al., “Monoclonal Antibodies For Immunotargeting Of Drugs In Cancer Therapy”, in Monoclonal Antibodies And Cancer Therapy, Reisfeld et al. (eds.), pp. 243-56 (Alan R. Liss, Inc. 1985); Hellstrom et al., “Antibodies For Drug Delivery”, in Controlled Drug Delivery (2nd Ed.), Robinson et al. (eds.), pp. 623-53 (Marcel Dekker, Inc. 1987); Thorpe, “Antibody Carriers Of Cytotoxic Agents In Cancer Therapy: A Review”, in Monoclonal Antibodies '84: Biological And Clinical Applications, Pinchera et al. (eds.), pp. 475-506 (1985); “Analysis, Results, And Future Prospective Of The Therapeutic Use Of Radiolabeled Antibody In Cancer Therapy”, in Monoclonal Antibodies For Cancer Detection And Therapy, Baldwin et al. (eds.), pp. 303-16 (Academic Press 1985), and Thorpe et al., “The Preparation And Cytotoxic Properties Of Antibody-Toxin Conjugates”, Immunol. Rev. 62:119-58 (1982).

[0281] Alternatively, an antibody can be conjugated to a second antibody to form an antibody heteroconjugate as described by Segal in U.S. Pat. No. 4,676,980, which is incorporated herein by reference in its entirety.

[0282] An antibody, with or without a therapeutic moiety conjugated to it, administered alone or in combination with cytotoxic factor(s) and/or cytokine(s) can be used as a therapeutic.

[0283] Immunophenotyping

[0284] The antibodies of the invention may be utilized for immunophenotyping of cell lines and biological samples. Translation products of the genes of the present invention may be useful as cell specific markers, or more specifically as cellular markers that are differentially expressed at various stages of differentiation and/or maturation of particular cell types. Monoclonal antibodies directed against a specific epitope, or combination of epitopes, will allow for the screening of cellular populations expressing the marker. Various techniques can be utilized using monoclonal antibodies to screen for cellular populations expressing the marker(s), and include magnetic separation using antibody-coated magnetic beads, “panning” with antibody attached to a solid matrix (i.e., plate), and flow cytometry (See, e.g., U.S. Pat. No. 5,985,660; and Morrison et al., Cell, 96:737-49 (1999)).

[0285] These techniques allow for the screening of particular populations of cells, such as might be found with hematological malignancies (i.e. minimal residual disease (MRD) in acute leukemic patients) and “non-self” cells in transplantations to prevent Graft-versus-Host Disease (GVHD). Alternatively, these techniques allow for the screening of hematopoietic stem and progenitor cells capable of undergoing proliferation and/or differentiation, as might be found in human umbilical cord blood.

[0286] Assays for Antibody Binding

[0287] The antibodies of the invention may be assayed for immunospecific binding by any method known in the art. The immunoassays which can be used include but are not limited to competitive and non-competitive assay systems using techniques such as western blots, radioimmunoassays, ELISA (enzyme linked immunosorbent assay), “sandwich” immunoassays, immunoprecipitation assays, precipitin reactions, gel diffusion precipitin reactions, immunodiffusion assays, agglutination assays, complement-fixation assays, immunoradiometric assays, fluorescent immunoassays, and protein A immunoassays, to name but a few. Such assays are routine and well known in the art (see, e.g., Ausubel et al, eds, 1994, Current Protocols in Molecular Biology, Vol. 1, John Wiley & Sons, Inc., New York, which is incorporated by reference herein in its entirety). Exemplary immunoassays are described briefly below (but are not intended by way of limitation).

[0288] Immunoprecipitation protocols generally comprise lysing a population of cells in a lysis buffer such as RIPA buffer (1% NP-40 or Triton X-100, 1% sodium deoxycholate, 0.1% SDS, 0.15 M NaCl, 0.01 M sodium phosphate at pH 7.2, 1% Trasylol) supplemented with protein phosphatase and/or protease inhibitors (e.g., EDTA, PMSF, aprotinin, sodium vanadate), adding the antibody of interest to the cell lysate, incubating for a period of time (e.g., 1-4 hours) at 4° C., adding protein A and/or protein G sepharose beads to the cell lysate, incubating for about an hour or more at 4° C., washing the beads in lysis buffer and resuspending the beads in SDS/sample buffer. The ability of the antibody of interest to immunoprecipitate a particular antigen can be assessed by, e.g., western blot analysis. One of skill in the art would be knowledgeable as to the parameters that can be modified to increase the binding of the antibody to an antigen and decrease the background (e.g., pre-clearing the cell lysate with sepharose beads). For further discussion regarding immunoprecipitation protocols see, e.g., Ausubel et al., eds., (1994), Current Protocols in Molecular Biology, Vol. 1, John Wiley & Sons, Inc., New York, section 10.16.1.

[0289] Western blot analysis generally comprises preparing protein samples, electrophoresis of the protein samples in a polyacrylamide gel (e.g., 8%-20% SDS-PAGE depending on the molecular weight of the antigen), transferring the-protein sample from the polyacrylamide gel to a membrane such as nitrocellulose, PVDF or nylon, blocking the membrane in blocking solution (e.g., PBS with 3% BSA or non-fat milk), washing the membrane in washing buffer (e.g., PBS-Tween 20), blocking the membrane with primary antibody (the antibody of interest) diluted in blocking buffer, washing the membrane in washing buffer, blocking the membrane with a secondary antibody (which recognizes the primary antibody, e.g., an anti-human antibody) conjugated to an enzymatic substrate (e.g., horseradish peroxidase or alkaline phosphatase) or radioactive molecule (e.g., 32P or 125I) diluted in blocking buffer, washing the membrane in wash buffer, and detecting the presence of the antigen. One of skill in the art would be knowledgeable as to the parameters that can be modified to increase the signal detected and to reduce the background noise. For further discussion regarding western blot protocols see, e.g., Ausubel et al., eds., (1994), Current Protocols in Molecular Biology, Vol. 1, John Wiley & Sons, Inc., New York, section 10.8.1.

[0290] ELISAs comprise preparing antigen, coating the well of a 96 well microtiter plate with the antigen, adding the antibody of interest conjugated to a detectable compound such as an enzymatic substrate (e.g., horseradish peroxidase or alkaline phosphatase) to the well and incubating for a period of time, and detecting the presence of the antigen. In ELISAs the antibody of interest does not have to be conjugated to a detectable compound; instead, a second antibody (which recognizes the antibody of interest) conjugated to a detectable compound may be added to the well. Further, instead of coating the well with the antigen, the antibody may be coated to the well. In this case, a second antibody conjugated to a detectable compound may be added following the addition of the antigen of interest to the coated well. One of skill in the art would be knowledgeable as to the parameters that can be modified to increase the signal detected as well as other variations of ELISAs known in the art. For further discussion regarding ELISAs see, e.g., Ausubel et al., eds., (1994), Current Protocols in Molecular Biology, Vol. 1, John Wiley & Sons, Inc., New York, section 11.2.1.

[0291] The binding affinity of an antibody to an antigen and the off-rate of an antibody-antigen interaction can be determined by competitive binding assays. One example of a competitive binding assay is a radioimmunoassay comprising the incubation of labeled antigen (e.g., 3H or 125I) with the antibody of interest in the presence of increasing amounts of unlabeled antigen, and the detection of the antibody bound to the labeled antigen. The affinity of the antibody of interest for a particular antigen and the binding off-rates can be determined from the data by scatchard plot analysis. Competition with a second antibody can also be determined using radioimmunoassays. In this case, the antigen is incubated with antibody of interest conjugated to a labeled compound (e.g., 3H or 125I) in the presence of increasing amounts of an unlabeled second antibody.

[0292] Antibodies of the invention may be characterized using immunocytochemisty methods on cells (e.g., mammalian cells, such as CHO cells) transfected with a vector enabling the expression of an ovarian and/or breast antigen or with vector alone using techniques commonly known in the art. Antibodies that bind ovarian and/or breast antigen transfected cells, but not vector-only transfected cells, are ovarian and/or breast antigen specific.

[0293] Therapeutic Uses

[0294] The present invention is further directed to antibody-based therapies which involve administering antibodies of the invention to an animal, preferably a mammal, and most preferably a human, patient for treating one or more of the disclosed diseases, disorders, or conditions. Therapeutic compounds of the invention include, but are not limited to, antibodies of the invention (including fragments, analogs and derivatives thereof as described herein) and nucleic acids encoding antibodies of the invention (including fragments, analogs and derivatives thereof and anti-idiotypic antibodies as described herein). The antibodies of the invention can be used to treat, inhibit or prevent diseases, disorders or conditions associated with aberrant expression and/or activity of a polypeptide of the invention, including, but not limited to, any one or more of the diseases, disorders, or conditions described herein. The treatment and/or prevention of diseases, disorders, or conditions associated with aberrant expression and/or activity of a polypeptide of the invention includes, but is not-limited to, alleviating symptoms associated with those diseases, disorders or conditions. Antibodies of the invention may be provided in pharmaceutically acceptable compositions as known in the art or as described herein.

[0295] In a specific and preferred embodiment, the present invention is directed to antibody-based therapies which involve administering antibodies of the invention to an animal, preferably a mammal, and most preferably a human, patient for treating one or more of the diseases, disorders, or conditions of the ovarian and/or breast, including, but not limited to, neoplastic disorders (e.g., ovarian Krukenberg tumor, malignant mixed Mullerian tumors, and/or as described under “Hyperproliferative Disorders” below), infectious diseases (e.g., mastitis, oophoritis, and/or as described under “Infectious Diseases” below), and inflammatory diseases (e.g., abcesses and/or as described under “Immune Disorders” below), and as described under “Reproductive System Disorders” below. Therapeutic compounds of the invention include, but are not limited to, antibodies of the invention (e.g., antibodies directed to the full length protein expressed on the cell surface of a mammalian cell; antibodies directed to an epitope of an ovarian and/or breast associated polypeptide of the invention (such as, a linear epitope (shown in Table 1A, column 6) or a conformational epitope), including fragments, analogs and derivatives thereof as described herein) and nucleic acids encoding antibodies of the invention (including fragments, analogs and derivatives thereof and anti-idiotypic antibodies as described herein). The antibodies of the invention can be used to treat, inhibit or prevent diseases, disorders or conditions associated with aberrant expression and/or activity of a polypeptide of the invention, including, but not limited to, any one or more of the diseases, disorders, or conditions of the ovaries and/or breast described herein. The treatment and/or prevention of diseases, disorders, or conditions of the ovaries and/or breast associated with aberrant expression and/or activity of a polypeptide of the invention includes, but is not limited to, alleviating symptoms associated with those diseases, disorders or conditions. Antibodies of the invention may be provided in pharmaceutically acceptable compositions as known in the art or as described herein.

[0296] A summary of the ways in which the antibodies of the present invention may be used therapeutically includes binding polynucleotides or polypeptides of the present invention locally or systemically in the body or by direct cytotoxicity of the antibody, e.g. as mediated by complement (CDC) or by effector cells (ADCC). Some of these approaches are described in more detail below. Armed with the teachings provided herein, one of ordinary skill in the art will know how to use the antibodies of the present invention for diagnostic, monitoring or therapeutic purposes without undue experimentation.

[0297] The antibodies of this invention may be advantageously utilized in combination with other monoclonal or chimeric antibodies, or with lymphokines or hematopoietic growth factors (such as, e.g., IL-2, IL-3 and IL-7), for example, which serve to increase the number or activity of effector cells which interact with the antibodies.

[0298] The antibodies of the invention may be administered alone or in combination with other types of treatments (e.g., radiation therapy, chemotherapy, hormonal therapy, immunotherapy and anti-tumor agents). Generally, administration of products of a species origin or species reactivity (in the case of antibodies) that is the same species as that of the patient is preferred. Thus, in a preferred embodiment, human antibodies, fragments derivatives, analogs, or nucleic acids, are administered to a human patient for therapy or prophylaxis.

[0299] It is preferred to use high affinity and/or potent in vivo inhibiting and/or neutralizing antibodies against polypeptides or polynucleotides of the present invention, fragments or regions thereof, for both immunoassays directed to and therapy of disorders related to polynucleotides or polypeptides, including fragments thereof, of the present invention. Such antibodies, fragments, or regions, will preferably have an affinity for polynucleotides or polypeptides of the invention, including fragments thereof. Preferred binding affinities include those with a dissociation constant or Kd less than 5×10⁻² M, 10⁻² M, 5×10⁻³ M, 10⁻³ M, 5×10⁻⁴ M, 10⁻⁴ M, 5×10⁻⁵ M, 10⁻⁵ M, 5×10⁻⁶ M, 10⁻⁶ M, 5×10⁻⁷ M, 10⁻⁷ M, 5×10⁸ M, 10⁻⁸ M, 5×10⁻⁹ M, 10⁻⁹ M, 5×10⁻¹⁰ M, 10⁻¹⁰ M, 5×10⁻¹¹ M, 10⁻¹¹ M, 5×10⁻¹² M, 10⁻¹² M, 5×10⁻¹³ M, 10⁻¹³ M, 5×10⁻¹⁴ M, 10⁻¹⁴ M, 5×10⁻¹⁵ M, and 10⁻¹⁵ M.

[0300] Gene Therapy

[0301] In a specific embodiment, nucleic acids comprising sequences encoding antibodies or functional derivatives thereof, are administered to treat, inhibit or prevent a disease or disorder associated with aberrant expression and/or activity of a polypeptide of the invention, by way of gene therapy. Gene therapy refers to therapy performed by the administration to a subject of an expressed or expressible nucleic acid. In this embodiment of the invention, the nucleic acids produce their encoded protein that mediates a therapeutic effect.

[0302] Any of the methods for gene therapy available in the art can be used according to the present invention. Exemplary methods are described below.

[0303] For general reviews of the methods of gene therapy, see Goldspiel et al., Clinical Pharmacy 12:488-505 (1993); Wu and Wu, Biotherapy 3:87-95 (1991); Tolstoshev, Ann. Rev. Pharmacol. Toxicol. 32:573-596 (1993); Mulligan, Science 260:926-932 (1993); and Morgan and Anderson, Ann. Rev. Biochem. 62:191-217 (1993); May, TIBTECH 11(5):155-215 (1993). Methods commonly known in the art of recombinant DNA technology which can be used are described in Ausubel et al. (eds.), Current Protocols in Molecular Biology, John Wiley & Sons, NY (1993); and Kriegler, Gene Transfer and Expression, A Laboratory Manual, Stockton Press, NY (1990).

[0304] In a preferred embodiment, the compound comprises nucleic acid sequences encoding an antibody, said nucleic acid sequences being part of expression vectors that express the antibody or fragments or chimeric proteins or heavy or light chains thereof in a suitable host. In particular, such nucleic acid sequences have promoters operably linked to the antibody coding region, said promoter being inducible or constitutive, and, optionally, tissue-specific. In another particular embodiment, nucleic acid molecules are used in which the antibody coding sequences and any other desired sequences are flanked by regions that promote homologous recombination at a desired site in the genome, thus providing for intrachromosomal expression of the antibody encoding nucleic acids (Koller and Smithies, Proc. Natl. Acad. Sci. USA 86:8932-8935 (1989); Zijlstra et al., Nature 342:435-438 (1989). In specific embodiments, the expressed antibody molecule is a single chain antibody; alternatively, the nucleic acid sequences include sequences encoding both the heavy and light chains, or fragments thereof, of the antibody.

[0305] Delivery of the nucleic acids into a patient may be either direct, in which case the patient is directly exposed to the nucleic acid or nucleic acid carrying vectors, or indirect, in which case, cells are first transformed with the nucleic acids in vitro, then transplanted into the patient. These two approaches are known, respectively, as in vivo or ex vivo gene therapy.

[0306] In a specific embodiment, the nucleic acid sequences are directly administered in vivo, where it is expressed to produce the encoded product. This can be accomplished by any of numerous methods known in the art, e.g., by constructing them as part of an appropriate nucleic acid expression vector and administering it so that they become intracellular, e.g., by infection using defective or attenuated retrovirals or other viral vectors (see U.S. Pat. No. 4,980,286), or by direct injection of naked DNA, or by use of microparticle bombardment (e.g., a gene gun; Biolistic, Dupont), or coating with lipids or cell-surface receptors or transfecting agents, encapsulation in liposomes, microparticles, or microcapsules, or by administering them in linkage to a peptide which is known to enter the nucleus, by administering it in linkage to a ligand subject to receptor-mediated endocytosis (see, e.g., Wu and Wu, J. Biol. Chem. 262:4429-4432 (1987)) (which can be used to target cell types specifically expressing the receptors), etc. In another embodiment, nucleic acid-ligand complexes can be formed in which the ligand comprises a fusogenic viral peptide to disrupt endosomes, allowing the nucleic acid to avoid lysosomal degradation. In yet another embodiment, the nucleic acid can be targeted in vivo for cell specific uptake and expression, by targeting a specific receptor (see, e.g., PCT Publications WO 92/06180; WO 92/22635; WO92/20316; WO93/14188, WO 93/20221). Alternatively, the nucleic acid can be introduced intracellularly and incorporated within host cell DNA for expression, by homologous recombination (Koller and Smithies, Proc. Natl. Acad. Sci. USA 86:8932-8935 (1989); Zijlstra et al., Nature 342:435-438 (1989)).

[0307] In a specific embodiment, viral vectors that contains nucleic acid sequences encoding an antibody of the invention are used. For example, a retroviral vector can be used (see Miller et al., Meth. Enzymol. 217:581-599 (1993)). These retroviral vectors contain the components necessary for the correct packaging of the viral genome and integration into the host cell DNA. The nucleic acid sequences encoding the antibody to be used in gene therapy are cloned into one or more vectors, which facilitates delivery of the gene into a patient. More detail about retroviral vectors can be found in Boesen et al., Biotherapy 6:291-302 (1994), which describes the use of a retroviral vector to deliver the mdr1 gene to hematopoietic stem cells in order to make the stem cells more resistant to chemotherapy. Other references illustrating the use of retroviral vectors in gene therapy are: Clowes et al., J. Clin. Invest. 93:644-651 (1994); Kiem et al., Blood 83:1467-1473 (1994); Salmons and Gunzberg, Human Gene Therapy 4:129-141 (1993); and Grossman and Wilson, Curr. Opin. in Genetics and Devel. 3:110-114 (1993).

[0308] Adenoviruses are other viral vectors that can be used in gene therapy. Adenoviruses are especially attractive vehicles for delivering genes to respiratory epithelia. Adenoviruses naturally infect respiratory epithelia where they cause a mild disease. Other targets for adenovirus-based delivery systems are liver, the central nervous system, endothelial cells, and muscle. Adenoviruses have the advantage of being capable of infecting non-dividing cells. Kozarsky and Wilson, Current Opinion in Genetics and Development 3:499-503 (1993) present a review of adenovirus-based gene therapy. Bout et al., Human Gene Therapy 5:3-10 (1994) demonstrated the use of adenovirus vectors to transfer genes to the respiratory epithelia of rhesus monkeys. Other instances of the use of adenoviruses in gene therapy can be found in Rosenfeld et al., Science 252:431-434 (1991); Rosenfeld et al., Cell 68:143-155 (1992); Mastrangeli et al., J. Clin. Invest. 91:225-234 (1993); PCT Publication WO94/12649; and Wang, et al., Gene Therapy 2:775-783 (1995). In a preferred embodiment, adenovirus vectors are used.

[0309] Adeno-associated virus (AAV) has also been proposed for use in gene therapy (Walsh et al., Proc. Soc. Exp. Biol. Med. 204:289-300 (1993); U.S. Pat. No. 5,436,146).

[0310] Another approach to gene therapy involves transferring a gene to cells in tissue culture by such methods as electroporation, lipofection, calcium phosphate mediated transfection, or viral infection. Usually, the method of transfer includes the transfer of a selectable marker to the cells. The cells are then placed under selection to isolate those cells that have taken up and are expressing the transferred gene. Those cells are then delivered to a patient.

[0311] In this embodiment, the nucleic acid is introduced into a cell prior to administration in vivo of the resulting recombinant cell. Such introduction can be carried out by any method known in the art, including but not limited to transfection, electroporation, microinjection, infection with a viral or bacteriophage vector containing the nucleic acid sequences, cell fusion, chromosome-mediated gene transfer, microcell-mediated gene transfer, spheroplast fusion, etc. Numerous techniques are known in the art for the introduction of foreign genes into cells (see, e.g., Loeffler and Behr, Meth. Enzymol. 217:599-618 (1993); Cohen et al., Meth. Enzymol. 217:618-644 (1993); Cline, Pharmac. Ther. 29:69-92m (1985) and may be used in accordance with the present invention, provided that the necessary developmental and physiological functions of the recipient cells are not disrupted. The technique should provide for the stable transfer of the nucleic acid to the cell, so that the nucleic acid is expressible by the cell and preferably heritable and expressible by its cell progeny.

[0312] The resulting recombinant cells can be delivered to a patient by various methods known in the art. Recombinant blood cells (e.g., hematopoietic stem or progenitor cells) are preferably administered intravenously. The amount of cells envisioned for use depends on the desired effect, patient state, etc., and can be determined by one skilled in the art.

[0313] Cells into which a nucleic acid can be introduced for purposes of gene therapy encompass any desired, available cell type, and include but are not limited to epithelial cells, endothelial cells, keratinocytes, fibroblasts, muscle cells, hepatocytes; blood cells such as T lymphocytes, B lymphocytes, monocytes, macrophages, neutrophils, eosinophils, megakaryocytes, granulocytes; various stem or progenitor cells, in particular hematopoietic stem or progenitor cells, e.g., as obtained from bone marrow, umbilical cord blood, peripheral blood, fetal liver, etc.

[0314] In a preferred embodiment, the cell used for gene therapy is autologous to the patient.

[0315] In an embodiment in which recombinant cells are used in gene therapy, nucleic acid sequences encoding an antibody are introduced into the cells such that they are expressible by the cells or their progeny, and the recombinant cells are then administered in vivo for therapeutic effect. In a specific embodiment, stem or progenitor cells are used. Any stem and/or progenitor cells which can be isolated and maintained in vitro can potentially be used in accordance with this embodiment of the present invention (see e.g. PCT Publication WO 94/08598; Stemple and Anderson, Cell 71:973-985 (1992); Rheinwald, Meth. Cell Bio. 21A:229 (1980); and Pittelkow and Scott, Mayo Clinic Proc. 61:771 (1986)).

[0316] In a specific embodiment, the nucleic acid to be introduced for purposes of gene therapy comprises an inducible promoter operably linked to the coding region, such that expression of the nucleic acid is controllable by the presence or absence of an appropriate inducer of transcription.

[0317] Demonstration of Therapeutic or Prophylactic Activity

[0318] The compounds or pharmaceutical compositions of the invention are preferably tested in vitro, and then in vivo for the desired therapeutic or prophylactic activity, prior to use in humans. For example, in vitro assays to demonstrate the therapeutic or prophylactic utility of a compound or pharmaceutical composition include, the effect of a compound on a cell line or a patient tissue sample. The effect of the compound or composition on the cell line and/or tissue sample can be determined utilizing techniques known to those of skill in the art including, but not limited to, rosette formation assays and cell lysis assays. In accordance with the invention, in vitro assays which can be used to determine whether administration of a specific compound is indicated, include in vitro cell culture assays in which a patient tissue sample is grown in culture, and exposed to or otherwise administered a compound, and the effect of such compound upon the tissue sample is observed.

[0319] Therapeutic/Prophylactic Administration and Composition

[0320] The invention provides methods of treatment, inhibition and prophylaxis by administration to a subject of an effective amount of a compound or pharmaceutical composition of the invention, preferably a polypeptide or antibody of the invention. In a preferred embodiment, the compound is substantially purified (e.g., substantially free from substances that limit its effect or produce undesired side-effects). The subject is preferably an animal, including but not limited to animals such as cows, pigs, horses, chickens, cats, dogs, etc., and is preferably a mammal, and most preferably human.

[0321] Formulations and methods of administration that can be employed when the compound comprises a nucleic acid or an immunoglobulin are described above; additional appropriate formulations and routes of administration can be selected from among those described herein below.

[0322] Various delivery systems are known and can be used to administer a compound of the invention, e.g., encapsulation in liposomes, microparticles, microcapsules, recombinant cells capable of expressing the compound, receptor-mediated endocytosis (see, e.g., Wu and Wu, J. Biol. Chem. 262:4429-4432 (1987)), construction of a nucleic acid as part of a retroviral or other vector, etc. Methods of introduction include but are not limited to intradermal, intramuscular, intraperitoneal, intravenous, subcutaneous, intranasal, epidural, and oral routes. The compounds or compositions may be administered by any convenient route, for example by infusion or bolus injection, by absorption through epithelial or mucocutaneous linings (e.g., oral mucosa, rectal and intestinal mucosa, etc.) and may be administered together with other biologically active agents. Administration can be systemic or local. In addition, it may be desirable to introduce the pharmaceutical compounds or compositions of the invention into the central nervous system by any suitable route, including intraventricular and intrathecal injection; intraventricular injection may be facilitated by an intraventricular catheter, for example, attached to a reservoir, such as an Ommaya reservoir. Pulmonary administration can also be employed, e.g., by use of an inhaler or nebulizer, and formulation with an aerosolizing agent.

[0323] In a specific embodiment, it may be desirable to administer the pharmaceutical compounds or compositions of the invention locally to the area in need of treatment; this may be achieved by, for example, and not by way of limitation, local infusion during surgery, topical application, e.g., in conjunction with a wound dressing after surgery, by injection, by means of a catheter, by means of a suppository, or by means of an implant, said implant being of a porous, non-porous, or gelatinous material, including membranes, such as sialastic membranes, or fibers. Preferably, when administering a protein, including an antibody, of the invention, care must be taken to use materials to which the protein does not absorb.

[0324] In another embodiment, the compound or composition can be delivered in a vesicle, in particular a liposome (see Langer, Science 249:1527-1533 (1990); Treat et al., in Liposomes in the Therapy of Infectious Disease and Cancer, Lopez-Berestein and Fidler (eds.), Liss, New York, pp. 353-365 (1989); Lopez-Berestein, ibid., pp. 317-327; see generally ibid.)

[0325] In yet another embodiment, the compound or composition can be delivered in a controlled release system. In one embodiment, a pump may be used (see Langer, supra; Sefton, CRC Crit. Ref. Biomed. Eng. 14:201 (1987); Buchwald et al., Surgery 88:507 (1980); Saudek et al., N. Engl. J. Med. 321:574 (1989)). In another embodiment, polymeric materials can be used (see Medical Applications of Controlled Release, Langer and Wise (eds.), CRC Pres., Boca Raton, Fla. (1974); Controlled Drug Bioavailability, Drug Product Design and Performance, Smolen and Ball (eds.), Wiley, New York (1984); Ranger and Peppas, J., Macromol. Sci. Rev. Macromol. Chem. 23:61 (1983); see also Levy et al., Science 228:190 (1985); During et al., Ann. Neurol. 25:351 (1989); Howard et al., J.Neurosurg. 71:105 (1989)). In yet another embodiment, a controlled release system can be placed in proximity of the therapeutic target, e.g., the brain, thus requiring only a fraction of the systemic dose (see, e.g., Goodson, in Medical Applications of Controlled Release, supra, vol. 2, pp. 115-138 (1984)).

[0326] Other controlled release systems are discussed in the review by Langer (Science 249:1527-1533 (1990)).

[0327] In a specific embodiment where the compound of the invention is a nucleic acid encoding a protein, the nucleic acid can be administered in vivo to promote expression of its encoded protein, by constructing it as part of an appropriate nucleic acid expression vector and administering it so that it becomes intracellular, e.g., by use of a retroviral vector (see U.S. Pat. No. 4,980,286), or by direct injection, or by use of microparticle bombardment (e.g., a gene gun; Biolistic, Dupont), or coating with lipids or cell-surface receptors or transfecting agents, or by administering it in linkage to a homeobox-like peptide which is known to enter the nucleus (see e.g., Joliot et al., Proc. Natl. Acad. Sci. USA 88:1864-1868 (1991)), etc. Alternatively, a nucleic acid can be introduced intracellularly and incorporated within host cell DNA for expression, by homologous recombination.

[0328] The present invention also provides pharmaceutical compositions. Such compositions comprise a therapeutically effective amount of a compound, and a pharmaceutically acceptable carrier. In a specific embodiment, the term “pharmaceutically acceptable” means approved by a regulatory agency of the Federal or a state government or listed in the U.S. Pharmacopeia or other generally recognized pharmacopeia for use in animals, and more particularly in humans. The term “carrier” refers to a diluent, adjuvant, excipient, or vehicle with which the therapeutic is administered. Such pharmaceutical carriers can be sterile liquids, such as water and oils, including those of petroleum, animal, vegetable or synthetic origin, such as peanut oil, soybean oil, mineral oil, sesame oil and the like. Water is a preferred carrier when the pharmaceutical composition is administered intravenously. Saline solutions and aqueous dextrose and glycerol solutions can also be employed as liquid carriers, particularly for injectable solutions. Suitable pharmaceutical excipients include starch, glucose, lactose, sucrose, gelatin, malt, rice, flour, chalk, silica gel, sodium stearate, glycerol monostearate, talc, sodium chloride, dried skim milk, glycerol, propylene, glycol, water, ethanol and the like. The composition, if desired, can also contain minor amounts of wetting or emulsifying agents, or pH buffering agents. These compositions can take the form of solutions, suspensions, emulsion, tablets, pills, capsules, powders, sustained-release formulations and the like. The composition can be formulated as a suppository, with traditional binders and carriers such as triglycerides. Oral formulation can include standard carriers such as pharmaceutical grades of mannitol, lactose, starch, magnesium stearate, sodium saccharine, cellulose, magnesium carbonate, etc. Examples of suitable pharmaceutical carriers are described in “Remington's Pharmaceutical Sciences” by E. W. Martin. Such compositions will contain a therapeutically effective amount of the compound, preferably in purified form, together with a suitable amount of carrier so as to provide the form for proper administration to the patient. The formulation should suit the mode of administration.

[0329] In a preferred embodiment, the composition is formulated in accordance with routine procedures as a pharmaceutical composition adapted for intravenous administration to human beings. Typically, compositions for intravenous administration are solutions in sterile isotonic aqueous buffer. Where necessary, the composition may also include a solubilizing agent and a local anesthetic such as lignocaine to ease pain at the site of the injection. Generally, the ingredients are supplied either separately or mixed together in unit dosage form, for example, as a dry lyophilized powder or water free concentrate in a hermetically sealed container such as an ampoule or sachette indicating the quantity of active agent. Where the composition is to be administered by infusion, it can be dispensed with an infusion bottle containing sterile pharmaceutical grade water or saline. Where the composition is administered by injection, an ampoule of sterile water for injection or saline can be provided so that the ingredients may be mixed prior to administration.

[0330] The compounds of the invention can be formulated as neutral or salt forms. Pharmaceutically acceptable salts include those formed with anions such as those derived from hydrochloric, phosphoric, acetic, oxalic, tartaric acids, etc., and those formed with cations such as those derived from sodium, potassium, ammonium, calcium, ferric hydroxides, isopropylamine, triethylamine, 2-ethylamino ethanol, histidine, procaine, etc.

[0331] The amount of the compound of the invention which will be effective in the treatment, inhibition and prevention of a disease or disorder associated with aberrant expression and/or activity of a polypeptide of the invention can be determined by standard clinical techniques. In addition, in vitro assays may optionally be employed to help identify optimal dosage ranges. The precise dose to be employed in the formulation will also depend on the route of administration, and the seriousness of the disease or disorder, and should be decided according to the judgment of the practitioner and each patient's circumstances. Effective doses may be extrapolated from dose-response curves derived from in vitro or animal model test systems.

[0332] For antibodies, the dosage administered to a patient is typically 0.1 mg/kg to 100 mg/kg of the patient's body weight. Preferably, the dosage administered to a patient is between 0.1 mg/kg and 20 mg/kg of the patient's body weight, more preferably 1 mg/kg to 10 mg/kg of the patient's body weight. Generally, human antibodies have a longer half-life within the human body than antibodies from other species due to the immune response to the foreign polypeptides. Thus, lower dosages of human antibodies and less frequent administration is often possible. Further, the dosage and frequency of administration of antibodies of the invention may be reduced by enhancing uptake and tissue penetration (e.g., into the brain) of the antibodies by modifications such as, for example, lipidation.

[0333] The invention also provides a pharmaceutical pack or kit comprising one or more containers filled with one or more of the ingredients of the pharmaceutical compositions of the invention. Optionally associated with such container(s) can be a notice in the form prescribed by a governmental agency regulating the manufacture, use or sale of pharmaceuticals or biological products, which notice reflects approval by the agency of manufacture, use or sale for human administration.

[0334] Diagnosis and Imaging

[0335] Labeled antibodies, and derivatives and analogs thereof, which specifically bind to a polypeptide of interest can be used for diagnostic purposes to detect, diagnose, or monitor diseases, disorders, and/or conditions associated with the aberrant expression and/or activity of a polypeptide of the invention. The invention provides for the detection of aberrant expression of a polypeptide of interest, comprising (a) assaying the expression of the polypeptide of interest in cells or body fluid of an individual using one or more antibodies specific to the polypeptide interest and (b) comparing the level of gene expression with a standard gene expression level, whereby an increase or decrease in the assayed polypeptide gene expression level compared to the standard expression level is indicative of aberrant expression.

[0336] The invention provides a diagnostic assay for diagnosing an ovarian and/or breast disorder, comprising (a) assaying the expression of the polypeptide of interest in cells or body fluid of an individual using one or more antibodies specific to the polypeptide interest and (b) comparing the level of gene expression with a standard gene expression level, whereby an increase or decrease in the assayed polypeptide gene expression level compared to the standard expression level is indicative of a particular disorder. With respect to cancer, the presence of a relatively high amount of transcript in biopsied tissue from an individual may indicate a predisposition for the development of the disease, or may provide a means for detecting the disease prior to the appearance of actual clinical symptoms. A more definitive diagnosis of this type may allow health professionals to employ preventative measures or aggressive treatment earlier thereby preventing the development or further progression of the cancer.

[0337] Antibodies of the invention can be used to assay protein levels in a biological sample using classical immunohistological methods known to those of skill in the art (e.g., see Jalkanen et al., J. Cell. Biol. 101:976-985 (1985); Jalkanen et al., J. Cell. Biol. 105:3087-3096 (1987)). Other antibody-based methods useful for detecting protein gene expression include immunoassays, such as the enzyme linked immunosorbent assay (ELISA) and the radioimmunoassay (RIA). Suitable antibody assay labels are known in the art and include enzyme labels, such as, glucose oxidase; radioisotopes, such as iodine (125I, 121I), carbon (14C), sulfur (35S), tritium (3H), indium (112In), and technetium (99Tc); luminescent labels, such as luminol; and fluorescent labels, such as fluorescein and rhodamine, and biotin.

[0338] One facet of the invention is the detection and diagnosis of a disease or disorder associated with aberrant expression of a polypeptide of interest in an animal, preferably a mammal and most preferably a human. A preferred embodiment of the invention is the detection and diagnosis of a disease or disorder of the ovarian and/or breast associated with aberrant expression of an ovarian and/or breast antigen in an animal, preferably a mammal and most preferably a human. In one embodiment, diagnosis comprises: a) administering (for example, parenterally, subcutaneously, or intraperitoneally) to a subject an effective amount of a labeled molecule which specifically binds to the polypeptide of interest; b) waiting for a time interval following the administering for permitting the labeled molecule to preferentially concentrate at sites in the subject where the polypeptide is expressed (and for unbound labeled molecule to be cleared to background level); c) determining background level; and d) detecting the labeled molecule in the subject, such that detection of labeled molecule above the background level indicates that the subject has a particular disease or disorder associated with aberrant expression of the polypeptide of interest. Background level can be determined by various methods including, comparing the amount of labeled molecule detected to a standard value previously determined for a particular system.

[0339] It will be understood in the art that the size of the subject and the imaging system used will determine the quantity of imaging moiety needed to produce diagnostic images. In the case of a radioisotope moiety, for a human subject, the quantity of radioactivity injected will normally range from about 5 to 20 millicuries of 99mTc. The labeled antibody or antibody fragment will then preferentially accumulate at the location of cells which contain the specific protein. In vivo tumor imaging is described in S. W. Burchiel et al., “Immunopharmacokinetics of Radiolabeled Antibodies and Their Fragments.” (Chapter 13 in Tumor Imaging: The Radiochemical Detection of Cancer, S. W. Burchiel and B. A. Rhodes, eds., Masson Publishing Inc. (1982)).

[0340] Depending on several variables, including the type of label used and the mode of administration, the time interval following the administration for permitting the labeled molecule to preferentially concentrate at sites in the subject and for unbound labeled molecule to be cleared to background level is 6 to 48 hours or 6 to 24 hours or 6 to 12 hours. In another embodiment the time interval following administration is 5 to 20 days or 5 to 10 days.

[0341] In an embodiment, the method for diagnosing the disease or disorder, for example, one month after initial diagnosis, six months after initial diagnosis, one year after initial diagnosis, etc.

[0342] Presence of the labeled molecule can be detected in the patient using methods known in the art for in vivo scanning. These methods depend upon the type of label used. Skilled artisans will be able to determine the appropriate method for detecting a particular label. Methods and devices that may be used in the diagnostic methods of the invention include, but are not limited to, computed tomography (CT), whole body scan such as position emission tomography (PET), magnetic resonance imaging (MRI), and sonography.

[0343] In a specific embodiment, the molecule-is labeled with a radioisotope and is detected in the patient using a radiation responsive surgical instrument (Thurston et al., U.S. Pat. No. 5,441,050). In another embodiment, the molecule is labeled with a fluorescent compound and is detected in the patient using a fluorescence responsive scanning instrument. In another embodiment, the molecule is labeled with a positron emitting metal and is detected in the patent using positron emission-tomography. In yet another embodiment, the molecule is labeled with a paramagnetic label and is detected in a patient using magnetic resonance imaging (MRI).

[0344] Kits

[0345] The present invention provides kits that can be used in the above methods. In one embodiment, a kit comprises an antibody of the invention, preferably a purified antibody, in one or more containers. In a specific embodiment, the kits of the present invention contain a substantially isolated polypeptide comprising an epitope which is specifically immunoreactive with an antibody included in the kit. Preferably, the kits of the present invention further comprise a control antibody which does not react with the polypeptide of interest. In another specific embodiment, the kits of the present invention contain a means for detecting the binding of an antibody to a polypeptide of interest (e.g., the antibody may be conjugated to a detectable substrate such as a fluorescent compound, an enzymatic substrate, a radioactive compound or a luminescent compound, or a second antibody which recognizes the first antibody may be conjugated to a detectable substrate).

[0346] In another specific embodiment of the present invention, the kit is a diagnostic kit for use in screening serum containing antibodies specific against proliferative and/or cancerous polynucleotides and polypeptides. Such a kit may include a control antibody that does not react with the polypeptide of interest. Such a kit may include a substantially isolated polypeptide antigen comprising an epitope which is specifically immunoreactive with at least one anti-polypeptide antigen antibody. Further, such a kit includes means for detecting the binding of said antibody to the antigen (e.g., the antibody may be conjugated to a fluorescent compound such as fluorescein or rhodamine which can be detected by flow cytometry). In specific embodiments, the kit may include a recombinantly produced or chemically synthesized polypeptide antigen. The polypeptide antigen of the kit may also be attached to a solid support.

[0347] In a more specific embodiment the detecting means of the above-described kit includes a solid support to which said polypeptide antigen is attached. Such a kit may also include a non-attached reporter-labeled anti-human antibody. In this embodiment, binding of the antibody to the polypeptide antigen can be detected by binding of the said reporter-labeled antibody.

[0348] In an additional embodiment, the invention includes a diagnostic kit for use in screening serum containing antigens of the polypeptide of the invention. The diagnostic kit includes a substantially isolated antibody specifically immunoreactive with polypeptide or polynucleotide antigens, and means for detecting the binding of the polynucleotide or polypeptide antigen to the antibody. In one embodiment, the antibody is attached to a solid support. In a specific embodiment, the antibody may be a monoclonal antibody. The detecting means of the kit may include a second, labeled monoclonal antibody. Alternatively, or in addition, the detecting means may include a labeled, competing antigen.

[0349] In one diagnostic configuration, test serum is reacted with a solid phase reagent having a surface-bound antigen obtained by the methods of the present invention. After binding with specific antigen antibody to the reagent and removing unbound serum components by washing, the reagent is reacted with reporter-labeled anti-human antibody to bind reporter to the reagent in proportion to the amount of bound anti-antigen antibody on the solid support. The reagent is again washed to remove unbound labeled antibody, and the amount of reporter associated with the reagent is determined. Typically, the reporter is an enzyme which is detected by incubating the solid phase in the presence of a suitable fluorometric, luminescent or colorimetric substrate (Sigma, St. Louis, Mo.).

[0350] The solid surface reagent in the above assay is prepared by known techniques for attaching protein material to solid support material, such as polymeric beads, dip sticks, 96-well plate or filter material. These attachment methods generally include non-specific adsorption of the protein to the support or covalent attachment of the protein, typically through a free amine group, to a chemically reactive group on the solid support, such as an activated carboxyl, hydroxyl, or aldehyde group. Alternatively, streptavidin coated plates can be used in conjunction with biotinylated antigen(s).

[0351] Thus, the invention provides an assay system or kit for carrying out this diagnostic method. The kit generally includes a support with surface-bound recombinant antigens, and a reporter-labeled anti-human antibody for detecting surface-bound anti-antigen antibody.

[0352] Uses of the Polynucleotides

[0353] Each of the polynucleotides identified herein can be used in numerous ways as reagents. The following description should be considered exemplary and utilizes known techniques.

[0354] The polynucleotides of the present invention are useful for chromosome identification. There exists an ongoing need to identify new chromosome markers, since few chromosome marking reagents, based on actual sequence data (repeat polymorphisms), are presently available. Each sequence is specifically targeted to and can hybridize with a particular location on an individual human chromosome, thus each polynucleotide of the present invention can routinely be used as a chromosome marker using techniques known in the art. Table 1A, column 8 provides the chromosome location of some of the polynucleotides of the invention.

[0355] Briefly, sequences can be mapped to chromosomes by preparing PCR primers (preferably at least 15 bp (e.g., 15-25 bp) from the sequences shown in SEQ ID NO:X. Primers can optionally be selected using computer analysis so that primers do not span more than one predicted exon in the genomic DNA. These primers are then used for PCR screening of somatic cell hybrids containing individual human chromosomes. Only those hybrids containing the human gene corresponding to SEQ ID NO:X will yield an amplified fragment.

[0356] Similarly, somatic hybrids provide a rapid method of PCR mapping the polynucleotides to particular chromosomes. Three or more clones can be assigned per day using a single thermal cycler. Moreover, sublocalization of the polynucleotides can be achieved with panels of specific chromosome fragments. Other gene mapping strategies that can be used include in situ hybridization, prescreening with labeled flow-sorted chromosomes, preselection by hybridization to construct chromosome specific-cDNA libraries, and computer mapping techniques (See, e.g., Shuler, Trends Biotechnol 16:456-459 (1998) which is hereby incorporated by reference in its entirety).

[0357] Precise chromosomal location of the polynucleotides can also be achieved using fluorescence in situ hybridization (FISH) of a metaphase chromosomal spread. This technique uses polynucleotides as short as 500 or 600 bases; however, polynucleotides 2,000-4,000 bp are preferred. For a review of this technique, see Verma et al., “Human Chromosomes: a Manual of Basic Techniques,” Pergamon Press, New York (1988).

[0358] For chromosome mapping, the polynucleotides can be used individually (to mark a single chromosome or a single site on that chromosome) or in panels (for marking multiple sites and/or multiple chromosomes).

[0359] Thus, the present invention also provides a method for chromosomal localization which involves (a) preparing PCR primers from the polynucleotide sequences in Table 1A and/or Table 2 and SEQ ID NO:X and (b) screening somatic cell hybrids containing individual chromosomes.

[0360] The polynucleotides of the present invention would likewise be useful for radiation hybrid mapping, HAPPY mapping, and long range restriction mapping. For a review of these techniques and others known in the art, see, e.g. Dear, “Genome Mapping: A Practical Approach,” IRL Press at Oxford University Press, London (1997); Aydin, J. Mol. Med. 77:691-694 (1999); Hacia et al., Mol. Psychiatry 3:483-492 (1998); Herrick et al., Chromosome Res. 7:409-423 (1999); Hamilton et al., Methods Cell Biol. 62:265-280 (2000); and/or Ott, J. Hered. 90:68-70 (1999), each of which is hereby incorporated by reference in its entirety.

[0361] Once a polynucleotide has been mapped to a precise chromosomal location, the physical position of the polynucleotide can be used in linkage analysis. Linkage analysis establishes coinheritance between a chromosomal location and presentation of a particular disease. (Disease mapping data are found, for example, in V. McKusick, Mendelian Inheritance in Man (available on line through Johns Hopkins University Welch Medical Library).) Column 9 of Table 1A provides an OMIM reference identification number of diseases associated with the cytologic band disclosed in column 8 of Table 1A, as determined using techniques described herein and by reference to Table 5. Assuming 1 megabase mapping resolution and one gene per 20 kb, a cDNA precisely localized to a chromosomal region associated with the disease could be one of 50-500 potential causative genes.

[0362] Thus, once coinheritance is established, differences in a polynucleotide of the invention and the corresponding gene between affected and unaffected individuals can be examined. First, visible structural alterations in the chromosomes, such as deletions or translocations, are examined in chromosome spreads or by PCR. If no structural alterations exist, the presence of point mutations are ascertained. Mutations observed in some or all affected individuals, but not in normal individuals, indicate that the mutation may cause the disease. However, complete sequencing of the polypeptide and the corresponding gene from several normal individuals is required to distinguish the mutation from a polymorphism. If a new polymorphism is identified, this polymorphic polypeptide can be used for further linkage analysis.

[0363] Furthermore, increased or decreased expression of the gene in affected individuals as compared to unaffected individuals can be assessed using the polynucleotides of the invention. Any of these alterations (altered expression, chromosomal rearrangement, or mutation) can be used as a diagnostic or prognostic marker. Diagnostic and prognostic methods, kits and reagents encompassed by the present invention are briefly described below and more thoroughly elsewhere herein (see e.g., the sections labeled “Antibodies”, “Diagnostic Assays”, and “Methods for Detecting Ovarian and/or Breast Disease, Including Cancer”).

[0364] Thus, the invention also provides a diagnostic method useful during diagnosis of a disorder, involving measuring the expression level of polynucleotides of the present invention in cells or body fluid from an individual and comparing the measured gene expression level with a standard level of polynucleotide expression level, whereby an increase or decrease in the gene expression level compared to the standard is indicative of a disorder. Additional non-limiting examples of diagnostic methods encompassed by the present invention are more thoroughly described elsewhere herein (see, e.g., Example 12).

[0365] In still another embodiment, the invention includes a kit for analyzing samples for the presence of proliferative and/or cancerous polynucleotides derived from a test subject, as further described herein. In a general embodiment, the kit includes at least one polynucleotide probe containing a nucleotide sequence that will specifically hybridize with a polynucleotide of the invention and a suitable container. In a specific embodiment, the kit includes two polynucleotide probes defining an internal region of the polynucleotide of the invention, where each probe has one strand containing a 31′mer-end internal to the region. In a further embodiment, the probes may be useful as primers for polymerase chain reaction amplification.

[0366] Where a diagnosis of a related disorder, including, for example, diagnosis of a tumor, has already been made according to conventional methods, the present invention is useful as a prognostic indicator, whereby patients exhibiting enhanced or depressed polynucleotide of the invention expression will experience a worse clinical outcome relative to patients expressing the gene at a level nearer the standard level.

[0367] By “measuring the expression level of polynucleotides of the invention” is intended qualitatively or quantitatively measuring or estimating the level of the polypeptide of the invention or the level of the mRNA encoding the polypeptide of the invention in a first biological sample either directly (e.g., by determining or estimating absolute protein level or mRNA level) or relatively (e.g., by comparing to the polypeptide level or mRNA level in a second biological sample). Preferably, the polypeptide level or mRNA level in the first biological sample is measured or estimated and compared to a standard polypeptide level or mRNA level, the standard being taken from a second biological sample obtained from an individual not having the related disorder or being determined by averaging levels from a population of individuals not having a related disorder. As will be appreciated in the art, once a standard polypeptide level or mRNA level is known, it can be used repeatedly as a standard for comparison.

[0368] By “biological sample” is intended any biological sample obtained from an individual, body fluid, cell line, tissue culture, or other source which contains polypeptide of the present invention or the corresponding mRNA. As indicated, biological samples include body fluids (such as semen, lymph, vaginal pool, sera, plasma, urine, synovial fluid and spinal fluid) which contain the polypeptide of the present invention, and tissue sources found to express the polypeptide of the present invention. Methods for obtaining tissue biopsies and body fluids from mammals are well known in the art. Where the biological sample is to include mRNA, a tissue biopsy is the preferred source.

[0369] The method(s) provided above may preferably be applied in a diagnostic method and/or kits in which polynucleotides and/or polypeptides of the invention are attached to a solid support. In one exemplary method, the support may be a “gene chip” or a “biological chip” as described in U.S. Pat. Nos. 5,837,832, 5,874,219, and 5,856,174. Further, such a gene chip with polynucleotides of the invention attached may be used to identify polymorphisms between the isolated polynucleotide sequences of the invention, with polynucleotides isolated from a test subject. The knowledge of such polymorphisms (i.e., their location, as well as, their existence) would be beneficial in identifying disease loci for many disorders, such as for example, in neural disorders, immune system disorders, muscular disorders, reproductive disorders, gastrointestinal disorders, pulmonary disorders, digestive disorders, cardiovascular disorders, renal disorders, proliferative disorders, and/or cancerous diseases and conditions. Such a method is described in U.S. Pat. Nos. 5,858,659 and 5,856,104. The U.S. Patents referenced supra are hereby incorporated by reference in their entirety herein.

[0370] The present invention encompasses polynucleotides of the present invention that are chemically synthesized, or reproduced as peptide nucleic acids (PNA), or according to other methods known in the art. The use of PNAs would serve as the preferred form if the polynucleotides of the invention are incorporated onto a solid support, or gene chip. For the purposes of the present invention, a peptide nucleic acid (PNA) is a polyamide type of DNA analog and the monomeric units for adenine, guanine, thymine and cytosine are available commercially (Perceptive Biosystems). Certain components of DNA, such as phosphorus, phosphorus oxides, or deoxyribose derivatives, are not present in PNAs. As disclosed by Nielsen et al., Science 254:1497 (1991); and Egholm et al., Nature 365:666 (1993), PNAs bind specifically and tightly to complementary DNA strands and are not degraded by nucleases. In fact, PNA binds more strongly to DNA than DNA itself does. This is probably because there is no electrostatic repulsion between the two strands, and also the polyamide backbone is more flexible. Because of this, PNA/DNA duplexes bind under a wider range of stringency conditions than DNA/DNA duplexes, making it easier to perform multiplex hybridization. Smaller probes can be used than with DNA due to the strong binding. In addition, it is more likely that single base mismatches can be determined with PNA/DNA hybridization because a single mismatch in a PNA/DNA 15-mer lowers the melting point (T.sub.m) by 8°-20° C., vs. 4°-16° C. for the DNA/DNA 15-mer duplex. Also, the absence of charge groups in PNA means that hybridization can be done at low ionic strengths and reduce possible interference by salt during the analysis.

[0371] The compounds of the present invention have uses which include, but are not limited to, detecting cancer in mammals. In particular the invention is useful during diagnosis of pathological cell proliferative neoplasias which include, but are not limited to: acute myelogenous leukemias including acute monocytic leukemia, acute myeloblastic leukemia, acute promyelocytic leukemia, acute myelomonocytic leukemia, acute erythroleukemia, acute megakaryocytic leukemia, and acute undifferentiated leukemia, etc.; and chronic myelogenous leukemias including chronic myelomonocytic leukemia, chronic granulocytic leukemia, etc. Preferred mammals include monkeys, apes, cats, dogs, cows, pigs, horses, rabbits and humans. Particularly preferred are humans.

[0372] The compounds of the present invention have preferred uses which include, but are not limited to, detecting ovarian and/or breast cancer in mammals. In particular the invention is useful during diagnosis of pathological cell proliferative neoplasias which include, but are not limited to: ovarian epithelial cancer, ovarian germ cell tumors, ovarian papillary serous adenocarcinoma, ovarian mucinous adenocarcinoma, ovarian Krukenberg tumor, malignant mixed Mullerian tumors, ovarian low malignant tumors, ductal carcinoma in situ, Paget's disease, lobular carcinoma in situ, invasive ductal carcinoma, invasive lobular carcinoma, medullary carcinoma, pipillary carcinoma, secretory carcinoma, and apocrine carcinoma. Preferred mammals include monkeys, apes, cats, dogs, cows, pigs, horses, rabbits and humans. Particularly preferred are humans.

[0373] Pathological cell proliferative disorders are often associated with inappropriate activation of proto-oncogenes. (Gelmann, E. P. et al., “The Etiology of Acute Leukemia: Molecular Genetics and Viral Oncology,” in Neoplastic Diseases of the Blood, Vol 1., Wiemik, P. H. et al. eds., 161-182 (1985)). Neoplasias are now believed to result from the qualitative alteration of a normal cellular gene product, or from the quantitative modification of gene expression by insertion into the chromosome of a viral sequence, by chromosomal translocation of a gene to a more actively transcribed region, or by some other mechanism. (Gelmann et al., supra) It is likely that mutated or altered expression of specific genes is involved in the pathogenesis of some leukemias, among other tissues and cell types. (Gelmann et al., supra) Indeed, the human counterparts of the oncogenes involved in some animal neoplasias have been amplified or translocated in some cases of human leukemia and carcinoma. (Gelmann et al., supra)

[0374] For example, c-myc expression is highly amplified in the non-lymphocytic leukemia cell line HL-60. When HL-60 cells are chemically induced to stop proliferation, the level of c-myc is found to be downregulated. (International Publication Number WO 91/15580). However, it has been shown that exposure of HL-60 cells to a DNA construct that is complementary to the 5′ end of c-myc or c-myb blocks translation of the corresponding mRNAs which downregulates expression of the c-myc or c-myb proteins and causes arrest of cell proliferation and differentiation of the treated cells. (International Publication Number WO 91/15580; Wickstrom et al., Proc. Natl. Acad. Sci. 85:1028 (1988); Anfossi et al., Proc. Natl. Acad. Sci. 86:3379 (1989)). However, the skilled artisan would appreciate the present invention's usefulness is not be limited to treatment, prevention, diagnosis and/or prognosis, of proliferative disorders of cells and tissues of hematopoietic origin, in light of the numerous cells and cell types of varying origins which are known to exhibit proliferative phenotypes. In preferred embodiments, the compounds and/or methods of the invention are used to treat, prevent, diagnose, and/or prognose, proliferative disorders of ovarian and/or breast cells and tissues.

[0375] In addition to the foregoing, a polynucleotide of the present invention can be used to control gene expression through triple helix formation or through antisense DNA or RNA. Antisense techniques are discussed, for example, in Okano, J. Neurochem. 56: 560 (1991); “Oligodeoxynucleotides as Antisense Inhibitors of Gene Expression, CRC Press, Boca Raton, Fla. (1988). Triple helix formation is discussed in, for instance Lee et al., Nucleic Acids Research 6: 3073 (1979); Cooney et al., Science 241: 456 (1988); and Dervan et al., Science 251: 1360 (1991). Both methods rely on binding of the polynucleotide to a complementary DNA or RNA. For these techniques, preferred polynucleotides are usually oligonucleotides 20 to 40 bases in length and complementary to either the region of the gene involved in transcription (triple helix—see Lee et al., Nucl. Acids Res. 6:3073 (1979); Cooney et al., Science 241:456 (1988); and Dervan et al., Science 251:1360 (1991)) or to the mRNA itself (antisense—Okano, J. Neurochem. 56:560 (1991); Oligodeoxy-nucleotides as Antisense Inhibitors of Gene Expression, CRC Press, Boca Raton, Fla. (1988).) Triple helix formation optimally results in a shut-off of RNA transcription from DNA, while antisense RNA hybridization blocks translation of an mRNA molecule into polypeptide. The oligonucleotide described above can also be delivered to cells such that the antisense RNA or DNA may be expressed in vivo to inhibit production of polypeptide of the present invention antigens. Both techniques are effective in model systems, and the information disclosed herein can be used to design antisense or triple helix polynucleotides in an effort to treat disease, and in particular, for the treatment of proliferative diseases and/or conditions. Non-limiting antisense and triple helix methods encompassed by the present invention are more thoroughly described elsewhere herein (see, e.g., the section labeled “Antisense and Ribozyme (Antagonists)”).

[0376] Polynucleotides of the present invention are also useful in gene therapy. One goal of gene therapy is to insert a normal gene into an organism having a defective gene, in an effort to correct the genetic defect. The polynucleotides disclosed in the present invention offer a means of targeting such genetic defects in a highly accurate manner. Another goal is to insert a new gene that was not present in the host genome, thereby producing a new trait in the host cell. Additional non-limiting examples of gene therapy methods encompassed by the present invention are more thoroughly described elsewhere herein (see, e.g., the sections labeled “Gene Therapy Methods” and Examples 16, 17 and 18).

[0377] The polynucleotides are also useful for identifying individuals from minute biological samples. The United States military, for example, is considering the use of restriction fragment length polymorphism (RFLP) for identification of its personnel. In this technique, an individual's genomic DNA is digested with one or more restriction enzymes, and probed on a Southern blot to yield unique bands for identifying personnel. This method does not suffer from the current limitations of “Dog Tags” which can be lost, switched, or stolen, making positive identification difficult. The polynucleotides of the present invention can be used as additional DNA markers for RFLP.

[0378] The polynucleotides of the present invention can also be used as an alternative to RFLP, by determining the actual base-by-base DNA sequence of selected portions of an individual's genome. These sequences can be used to prepare PCR primers for amplifying and isolating such selected DNA, which can then be sequenced. Using this technique, individuals can be identified because each individual will have a unique set of DNA sequences. Once an unique ID database is established for an individual, positive identification of that individual, living or dead, can be made from extremely small tissue samples.

[0379] Forensic biology also benefits from using DNA-based identification techniques as disclosed herein. DNA sequences taken from very small biological samples such as tissues, e.g., hair or skin, or body fluids, e.g., blood, saliva, semen, synovial fluid, amniotic fluid, breast milk, lymph, pulmonary sputum or surfactant, urine, fecal matter, etc., can be amplified using PCR. In one prior art technique, gene sequences amplified from polymorphic loci, such as DQa class II HLA gene, are used in forensic biology to identify individuals. (Erlich, H., PCR Technology, Freeman and Co. (1992).) Once these specific polymorphic loci are amplified, they are digested with one or more restriction enzymes, yielding an identifying set of bands on a Southern blot probed with DNA corresponding to the DQa class II HLA gene. Similarly, polynucleotides of the present invention can be used as polymorphic markers for forensic purposes.

[0380] There is also a need for reagents capable of identifying the source of a particular tissue. Such need arises, for example, in forensics when presented with tissue of unknown origin. Appropriate reagents can comprise, for example, DNA probes or primers prepared from the sequences of the present invention, specific to tissues, including but not limited to, those sequences referred to in Table 1A. Panels of such reagents can identify tissue by species and/or by organ type. In a similar fashion, these reagents can be used to screen tissue cultures for contamination. Additional non-limiting examples of such uses are further described herein.

[0381] Because ovarian and/or breast antigens are found expressed in the ovaries and/or breast, the polynucleotides of the present invention are also useful as hybridization probes for differential identification of the tissue(s) or cell type(s) present in a biological sample. Similarly, polypeptides and antibodies directed to polypeptides of the present invention are useful to provide immunological probes for differential identification of the tissue(s) (e.g., immunohistochemistry assays) or cell type(s) (e.g., immunocytochemistry assays). In a specific embodiment, the polynucleotides of the present invention are also useful as hybridization probes for differential identification of ovarian and/or breast tissue(s) or cell type(s) present in a biological sample. Similarly, polypeptides and antibodies directed to polypeptides of the present invention are useful to provide immunological probes for differential identification of ovarian and/or breast tissue(s) (e.g., immunohistochemistry assays) or cell type(s) (e.g., immunocytochemistry assays). In addition, for a number of disorders of the above tissues or cells, significantly higher or lower levels of gene expression of the polynucleotides/polypeptides of the present invention may be detected in certain tissues (e.g., tissues expressing polypeptides and/or polynucleotides of the present invention, for example, normal ovarian and/or breast tissues or diseased ovarian and/or breast tissues, and/or those tissues/cells corresponding to the library source relating to a polynucleotide sequence of the invention as disclosed in column 7 of Table 1A, and/or cancerous and/or wounded tissues) or bodily fluids (e.g., semen, lymph, vaginal pool, serum, plasma, urine, synovial fluid or spinal fluid) taken from an individual having such a disorder, relative to a “standard” gene expression level, i.e., the expression level in healthy tissue from an individual not having the disorder.

[0382] Thus, the invention provides a diagnostic method of a disorder, which involves: (a) assaying gene expression level in cells or body fluid of an individual; (b) comparing the gene expression level with a standard gene expression level, whereby an increase or decrease in the assayed gene expression level compared to the standard expression level is indicative of a disorder.

[0383] In the very least, the polynucleotides of the present invention can be used as molecular weight markers on Southern gels, as diagnostic probes for the presence of a specific mRNA in a. particular cell type, as a probe to “subtract-out” known sequences in the process of discovering novel polynucleotides, for selecting and making oligomers for attachment to a “gene chip” or other support, to raise anti-DNA antibodies using DNA immunization techniques, and as an antigen to elicit an immune response.

[0384] Uses of the Polypeptides

[0385] Each of the polypeptides identified herein can be used in numerous ways. The following description should be considered exemplary and utilizes known techniques.

[0386] Polypeptides and antibodies directed to polypeptides of the present invention are useful to provide immunological probes for differential identification of the tissue(s) (e.g., immunohistochemistry assays such as, for example, ABC immunoperoxidase (Hsu et al., J. Histochem. Cytochem. 29:577-580 (1981)) or cell type(s) (e.g., immunocytochemistry assays).

[0387] Antibodies can be used to assay levels of polypeptides encoded by polynucleotides of the invention in a biological sample using classical immunohistological methods known to those of skill in the art (see, e.g., Jalkanen, et al., J. Cell. Biol. 101:976-985 (1985); Jalkanen, et al., J. Cell. Biol. 105:3087-3096 (1987)). Other antibody-based methods useful for detecting protein gene expression include immunoassays, such as the enzyme linked immunosorbent assay (ELISA) and the radioimmunoassay (RIA). Suitable antibody assay labels are known in the art and include enzyme labels, such as, glucose oxidase; radioisotopes, such as iodine (¹³¹I, ¹²⁵I, ¹²³I, ¹²¹I), carbon (¹⁴C), sulfur (³⁵S), tritium (³H), indium (^{115m}In, ^{113m}In, ¹¹²In, ¹¹¹ In), and technetium (⁹⁹Tc, ^{99m}Tc), thallium (²⁰¹Ti), gallium (⁶⁸Ga, ⁶⁷Ga), palladium (¹⁰³Pd), molybdenum (⁹⁹Mo), xenon (¹³³Xe), fluorine (¹⁸F), ¹⁵³Sm, ¹⁷⁷Lu, ¹⁵⁹Gd, ¹⁴⁹Pm, ¹⁴⁰La, ⁷⁵Yb, ¹⁶⁶Ho, ⁹⁰Y, ⁴⁷Sc, ⁶Re, ¹⁸⁸Re, ¹⁴²Pr, ¹⁰⁵Rh, ⁹⁷Ru; luminescent labels, such as luminol; and fluorescent labels, such as fluorescein and rhodamine, and biotin.

[0388] In addition to assaying levels of polypeptide of the present invention in a biological sample, proteins can also be detected in vivo by imaging. Antibody labels or markers for in vivo imaging of protein include those detectable by X-radiography, NMR or ESR. For X-radiography, suitable labels include radioisotopes such as barium or cesium, which emit detectable radiation but are not overtly harmful to the subject. Suitable markers for NMR and ESR include those with a detectable characteristic spin, such as deuterium, which may be incorporated into the antibody by labeling of nutrients for the relevant hybridoma.

[0389] An ovarian and/or breast antigen-specific antibody or antibody fragment which has been labeled with an appropriate detectable imaging moiety, such as a radioisotope (for example, ¹³¹I, ¹¹²In, ^{99m}Tc, (¹³¹I, ¹²⁵I, ¹²³, ¹²¹I), carbon (¹⁴C), sulfur (³⁵S), tritium (³H), indium (^{115m}In, ^{113m}In, ¹¹²In, ¹¹¹In), and technetium (⁹⁹Tc, ^{99m}Tc), thallium (²⁰¹Ti), gallium (⁶⁸Ga, ⁶⁷Ga), palladium (¹⁰³Pd), molybdenum (⁹⁹Mo), xenon (¹³³Xe) fluorine (¹⁸F, ¹⁵³Sm, ¹⁷⁷Lu, ¹⁵⁹Gd, ¹⁴⁹ Pm, ¹⁴⁰La, ¹⁷⁵Yb, ¹⁶⁶Ho, ⁹⁰Y, ⁴⁷Sc, ¹⁸⁶Re, ¹⁸⁸Re, ¹⁴²Pr, ¹⁰⁵Rh, ⁹⁷Ru), a radio-opaque substance, or a material detectable by nuclear magnetic resonance, is introduced (for example, parenterally, subcutaneously or intraperitoneally) into the mammal to be examined for ovarian and/or breast disorders. It will be understood in the art that the size of the subject and the imaging system used will determine the quantity of imaging moiety needed to produce diagnostic images. In the case of a radioisotope moiety, for a human subject, the quantity of radioactivity injected will normally range from about 5 to 20 millicuries of ^{99m}Tc. The labeled antibody or antibody fragment will then preferentially accumulate at the location of cells which express the polypeptide encoded by a polynucleotide of the invention. In vivo tumor imaging is described in S. W. Burchiel et al., “Immunopharmacokinetics of Radiolabeled Antibodies and Their Fragments” (Chapter 13 in Tumor Imaging: The Radiochemical Detection of Cancer, S. W. Burchiel and B. A. Rhodes, eds., Masson Publishing Inc. (1982)).

[0390] In one embodiment, the invention provides a method for the specific delivery of compositions of the invention to cells by administering polypeptides of the invention (e.g., polypeptides encoded by polynucleotides of the invention and/or antibodies) that are associated with heterologous polypeptides or nucleic acids. In one example, the invention provides a method for delivering a therapeutic protein into the targeted cell. In another example, the invention provides a method for delivering a single stranded nucleic acid (e.g., antisense or ribozymes) or double stranded nucleic acid (e.g., DNA that can integrate into the cell's genome or replicate episomally and that can be transcribed) into the targeted cell.

[0391] In another embodiment, the invention provides a method for the specific destruction of cells (e.g., the destruction of tumor cells) by administering polypeptides of the invention in association with toxins or cytotoxic prodrugs.

[0392] In a preferred embodiment, the invention provides a method for the specific destruction of ovarian and/or breast cells (e.g., aberrant ovarian and/or breast cells, ovarian and/or breast neoplasm) by administering polypeptides of the invention (e.g., polypeptides encoded by polynucleotides of the invention and/or antibodies) in association with toxins or cytotoxic prodrugs. In another preferred embodiment the invention provides a method for the specific destruction of tissues/cells corresponding to the library source relating to a polynucleotide sequence of the invention as disclosed in column 7 of Table 1A by administering polypeptides of the invention in association with toxins or cytotoxic prodrugs.

[0393] By “toxin” is meant one or more compounds that bind and activate endogenous cytotoxic effector systems, radioisotopes, holotoxins, modified toxins, catalytic subunits of toxins, or any molecules or enzymes not normally present in or on the surface of a cell that under defined conditions cause the cell's death. Toxins that may be used according to the methods of the invention include, but are not limited to, radioisotopes known in the art, compounds such as, for example, antibodies (or complement fixing containing portions thereof) that bind an inherent or induced endogenous cytotoxic effector system, thymidine kinase, endonuclease, RNAse, alpha toxin, ricin, abrin, Pseudomonas exotoxin A, diphtheria toxin, saporin, momórdin, gelonin, pokeweed antiviral protein, alpha-sarcin and cholera toxin. “Toxin” also includes a cytostatic or cytocidal agent, a therapeutic agent or a radioactive metal ion, e.g., alpha-emitters such as, for example, ²¹³Bi, or other radioisotopes such as, for example, ¹⁰³Pd, ¹³³Xe, ¹³¹I, ¹¹¹In, ⁶⁸Ge, ⁵⁷Co, ⁶⁵Zn, ⁸⁵Sr, ³²P, ³⁵S, ⁹⁰Y, ¹⁵³Sm, ¹⁵³Gd, ¹⁶⁹Yb, ⁵¹Cr, ⁵⁴Mn, ⁷⁵Se, ¹¹³Sn, ⁹⁰Yttrium, ¹¹⁷Tin, ¹⁸⁶Rhenium, ¹⁶⁶Holmium, and ¹⁸⁸Rhenium; luminescent labels, such as luminol; and fluorescent labels, such as fluorescein and rhodamine, and biotin.

[0394] In a specific embodiment, the invention provides a method for the specific destruction of cells (e.g., the destruction of tumor cells) by administering polypeptides of the invention or antibodies of the invention in association with the radioisotope ⁹⁰Y. In another specific embodiment, the invention provides a method for the specific destruction of cells (e.g., the destruction of tumor cells) by administering polypeptides of the invention or antibodies of the invention in association with the radioisotope ¹¹¹In. In a further specific embodiment, the invention provides a method for the specific destruction of cells (e.g., the destruction of tumor cells) by administering polypeptides of the invention or antibodies of the invention in association with the radioisotope ¹³¹I.

[0395] Techniques known in the art may be applied to label polypeptides of the invention (including antibodies). Such techniques include, but are not limited to, the use of bifunctional conjugating agents (see e.g., U.S. Pat. Nos. 5,756,065; 5,714,631; 5,696,239; 5,652,361; 5,505,931; 5,489,425; 5,435,990; 5,428,139; 5,342,604; 5,274,119; 4,994,560; and 5,808,003; the contents of each of which are hereby incorporated by reference in its entirety).

[0396] Thus, the invention provides a diagnostic method of a disorder, which involves (a) assaying the expression level of a polypeptide of the present invention in cells or body fluid of an individual; and (b) comparing the assayed polypeptide expression level with a standard polypeptide expression level, whereby an increase or decrease in the assayed polypeptide expression level compared to the standard expression level is indicative of a disorder. With respect to cancer, the presence of a relatively high amount of transcript in biopsied tissue from an individual may indicate a predisposition for the development of the disease, or may provide a means for detecting the disease prior to the appearance of actual clinical symptoms. A more definitive diagnosis of this type may allow health professionals to employ preventative measures or aggressive treatment earlier thereby preventing the development or further progression of the cancer.

[0397] Moreover, polypeptides of the present invention can be used to treat or prevent diseases or conditions of the ovaries and/or breast such as, for example, neoplastic disorders (e.g., ovarian Krukenberg tumor, malignant mixed Mullerian tumors, and/or as described under “Hyperproliferative Disorders” below), infectious diseases (e.g., mastitis, oophoritis, and/or as described under “Infectious Diseases” below), and inflammatory diseases (e.g., abcesses and/or as described under “Immune Disorders” below), and as described under “Reproductive System Disorders” below. In preferred embodiments, polynucleotides expressed in a particular tissue type (see, e.g., Table 1A, column 7) are used to diagnose, detect, prevent, treat and/or prognose disorders associated with the tissue type. For example, patients can be administered a polypeptide of the present invention in an effort to replace absent or decreased levels of the polypeptide (e.g., insulin), to supplement absent or decreased levels of a different polypeptide (e.g., hemoglobin S for hemoglobin B, SOD, catalase, DNA repair proteins), to inhibit the activity of a polypeptide (e.g., an oncogene or tumor supressor), to activate the activity of a polypeptide (e.g., by binding to a receptor), to reduce the activity of a membrane bound receptor by competing with it for free ligand (e.g., soluble TNF receptors used in reducing inflammation), or to bring about a desired response (e.g., blood vessel growth inhibition, enhancement of the immune response to proliferative cells or tissues).

[0398] Similarly, antibodies directed to a polypeptide of the present invention can also be used to treat disease (as described supra, and elsewhere herein). For example, administration of an antibody directed to a polypeptide of the present invention can bind, and/or neutralize the polypeptide, and/or reduce overproduction of the polypeptide. Similarly, administration of an antibody can activate the polypeptide, such as by binding to a polypeptide bound to a membrane (receptor).

[0399] At the very least, the polypeptides of the present invention can be used as molecular weight markers on SDS-PAGE gels or on molecular sieve gel filtration columns using methods well known to those of skill in the art. Polypeptides can also be used to raise antibodies, which in turn are used to measure protein expression from a recombinant cell, as a way of assessing transformation of the host cell. Moreover, the polypeptides of the present invention can be used to test the biological activities described herein.

[0400] Diagnostic Asssays

[0401] The compounds of the present invention are useful for diagnosis, treatment, prevention and/or prognosis of various ovary and/or breast related disorders in mammals, preferably humans. Such disorders include, but are not limited to, neoplastic disorders (e.g., ovarian Krukenberg tumor, malignant mixed Mullerian tumors, and/or as described under “Hyperproliferative Disorders” below), infectious diseases (e.g., mastitis, oophoritis, and/or as described under ““Infectious Diseases” below), and inflammatory diseases (e.g., abcesses and/or as described under “Immune Disorders” below), and as described under “Reproductive System Disorders” below. In preferred embodiments, polynucleotides expressed in a particular tissue type (see, e.g., Table 1A, column 7) are used to diagnose, detect, prevent, treat and/or prognose disorders associated with the tissue type.

[0402] Ovarian and/or breast antigens are expressed in ovarian and/or breast, with an increased expression level in the ovaries and/or breast. For a number of ovarian and/or breast-related disorders, substantially altered (increased or decreased) levels of ovarian and/or breast antigen gene expression can be detected in ovarian and/or breast tissue or other cells or bodily fluids (e.g., sera, plasma, urine, semen, synovial fluid or spinal fluid) taken from an individual having such a disorder, relative to a “standard” ovarian and/or breast antigen gene expression level, that is, the ovarian and/or breast antigen expression level in ovarian and/or breast tissues or bodily fluids from an individual not having the ovarian and/or breast disorder. Thus, the invention provides a diagnostic method useful during diagnosis of an ovarian and/or breast disorder, which involves measuring the expression level of the gene encoding the ovarian and/or breast associated polypeptide in ovarian and/or breast tissue or other cells or body fluid from an individual and comparing the measured gene expression level with a standard ovarian and/or breast antigens gene expression level, whereby an increase or decrease in the gene expression level(s) compared to the standard is indicative of an ovarian and/or breast disorder.

[0403] In specific embodiments, the invention provides a diagnostic method useful during diagnosis of a disorder of a normal or diseased tissue/cell source corresponding to column 7 of Table 1A, which involves measuring the expression level of the coding sequence of a polynucleotide sequence associated with this tissue/cell source as disclosed in Table 1A in the tissue/cell source or other cells or body fluid from an individual and comparing the expression level of the coding sequence with a standard expression level of the coding sequence of a polynucleotide sequence, whereby an increase or decrease in the gene expression level(s) compared to the standard is indicative of a disorder of a normal or diseased tissue/cell source corresponding to column 7 of Table 1A.

[0404] In particular, it is believed that certain tissues in mammals with cancer of cells or tissue of the ovaries and/or breast express significantly enhanced or reduced levels of normal or altered ovarian and/or breast antigen expression and mRNA encoding the ovarian and/or breast associated polypeptide when compared to a corresponding “standard” level. Further, it is believed that enhanced or depressed levels of the ovarian and/or breast associated polypeptide can be detected in certain body fluids (e.g., sera, plasma, urine, and spinal fluid) or cells or tissue from mammals with such a cancer when compared to sera from mammals of the same species not having the cancer.

[0405] For example, as disclosed herein, ovarian and/or breast associated polypeptides of the invention are expressed in the ovaries and/or breast. Accordingly, polynucleotides of the invention (e.g., polynucleotide sequences complementary to all or a portion of an ovarian and/or breast antigen mRNA nucleotide sequence of SEQ ID NO:X, nucleotide sequence encoding SEQ ID NO:Y, nucleotide sequence encoding a polypeptide encoded by SEQ ID NO:X and/or a nucleotide sequence delineated by columns 8 and 9 of Table 2) and antibodies (and antibody fragments) directed against the polypeptides of the invention may be used to quantitate or qualitate concentrations of cells of the ovarian and/or breast expressing ovarian and/or breast antigens, preferrably on their cell surfaces. These polynucleotides and antibodies additionally have diagnostic applications in detecting abnormalities in the level of ovarian and/or breast antigens gene expression, or abnormalities in the structure and/or temporal, tissue, cellular, or subcellular location of ovarian and/or breast antigens. These diagnostic assays may be performed in vivo or in vitro, such as, for example, on blood samples, biopsy tissue or autopsy tissue. In specific embodiments, polynucleotides and antibodies of the invention are used to quantitate or qualitate tissues/cells corresponding to the library source disclosed in column 7 of Table 1A expressing the corresponding ovarian and/or breast sequence disclosed in the same row of Table 1A, preferrably on their cell surface.

[0406] Thus, the invention provides a diagnostic method useful during diagnosis of an ovarian and/or breast disorder, including cancers, which involves measuring the expression level of the gene encoding the ovarian and/or breast antigen polypeptide in ovarian and/or breast tissue or other cells or body fluid from an individual and comparing the measured gene expression level with a standard ovarian and/or breast antigen gene expression level, whereby an increase or decrease in the gene expression level compared to the standard is indicative of an ovarian and/or breast disorder. In specific embodiments, polynucleotides and antibodies of the invention are used to quantitate or qualitate tissues/cells corresponding to the library source disclosed in column 7 of Table 1A expressing the corresponding ovarian and/or breast sequence disclosed in the same row of Table 1A, preferably on their cell surface.

[0407] Where a diagnosis of a disorder in the ovaries and/or breast, including diagnosis of a tumor, has already been made according to conventional methods, the present invention is useful as a prognostic indicator, whereby patients exhibiting enhanced or depressed ovarian and/or breast antigen gene expression will experience a worse clinical outcome relative to patients expressing the gene at a level nearer the standard level.

[0408] By “assaying the expression level of the gene encoding the ovarian and/or breast associated polypeptide” is intended qualitatively or quantitatively measuring or estimating the level of the ovarian and/or breast antigen polypeptide or the level of the mRNA encoding the ovarian and/or breast antigen polypeptide in a first biological sample either directly (e.g., by determining or estimating absolute protein level or mRNA level) or relatively (e.g., by comparing to the ovarian and/or breast associated polypeptide level or mRNA level in a second biological sample). Preferably, the ovarian and/or breast antigen polypeptide expression level or mRNA level in the first biological sample is measured or estimated and compared to a standard ovarian and/or breast antigen polypeptide level or mRNA level, the standard being taken from a second biological sample obtained from an individual not having the disorder or being determined by averaging levels from a population of individuals not having a disorder of the ovaries and/or breast. As will be appreciated in the art, once a standard ovarian and/or breast antigen polypeptide level or mRNA level is known, it can be used repeatedly as a standard for comparison.

[0409] By “biological sample” is intended any biological sample obtained from an individual, cell line, tissue culture, or other source containing ovarian and/or breast antigen polypeptides (including portions thereof) or mRNA. As indicated, biological samples include body fluids (such as sera, plasma, urine, synovial fluid and spinal fluid) which contain cells expressing ovarian and/or breast antigen polypeptides, ovarian and/or breast tissue, and other tissue sources found to express the full length or fragments thereof of a ovarian and/or breast antigen. Methods for obtaining tissue biopsies and body fluids from mammals are well known in the art. Where the biological sample is to include mRNA, a tissue biopsy is the preferred source.

[0410] Total cellular RNA can be isolated from a biological sample using any suitable technique such as the single-step guanidinium-thiocyanate-phenol-chloroform method described in Chomczynski and Sacchi, Anal. Biochem. 162:156-159 (1987). Levels of mRNA encoding the ovarian and/or breast antigen polypeptides are then assayed using any appropriate method. These include Northern blot analysis, S1 nuclease mapping, the polymerase chain reaction (PCR), reverse transcription in combination with the polymerase chain reaction (RT-PCR), and reverse transcription in combination with the ligase chain reaction (RT-LCR).

[0411] The present invention also relates to diagnostic assays such as quantitative and diagnostic assays for detecting levels of ovarian and/or breast antigen polypeptides, in a biological sample (e.g., cells and tissues), including determination of normal and abnormal levels of polypeptides. Thus, for instance, a diagnostic assay in accordance with the invention for detecting over-expression of ovarian and/or breast antigens compared to normal control tissue samples may be used to detect the presence of tumors. Assay techniques that can be used to determine levels of a polypeptide, such as an ovarian and/or breast antigen polypeptide of the present invention in a sample derived from a host are well-known to those of skill in the art. Such assay methods include radioimmunoassays, competitive-binding assays, Western Blot analysis and ELISA assays. Assaying ovarian and/or breast antigen polypeptide levels in a biological sample can occur using any art-known method.

[0412] Assaying ovarian and/or breast antigen polypeptide levels in a biological sample can occur using antibody-based techniques. For example, ovarian and/or breast antigen polypeptide expression in tissues can be studied with classical immunohistological methods (Jalkanen et al., J. Cell. Biol. 101:976-985 (1985); Jalkanen, M., et al., J. Cell. Biol. 105:3087-3096 (1987)). Other antibody-based methods useful for detecting ovarian and/or breast antigen polypeptide gene expression include immunoassays, such as the enzyme linked immunosorbent assay (ELISA) and the radioimmunoassay (RIA). Suitable antibody assay labels are known in the art and include enzyme labels, such as, glucose oxidase, and radioisotopes, such as iodine (¹²⁵I, ¹²¹I), carbon (¹⁴C), sulfur (³⁵S), tritium (³H), indium (¹¹²In), and technetium (^{99m}Tc), and fluorescent labels, such as fluorescein and rhodamine, and biotin.

[0413] The tissue or cell type to be analyzed will generally include those which are known, or suspected, to express the ovarian and/or breast antigen gene (such as, for example, cells of the ovaries and/or breast or ovarian and/or breast cancer). The protein isolation methods employed herein may, for example, be such as those described in Harlow and Lane (Harlow, E. and Lane, D., 1988, “Antibodies: A Laboratory Manual”, Cold Spring Harbor Laboratory Press, Cold Spring Harbor, N.Y.), which is incorporated herein by reference in its entirety. The isolated cells can be derived from cell culture or from a patient. The analysis of cells taken from culture may be a necessary step in the assessment of cells that could be used as part of a cell-based gene therapy technique or, alternatively, to test the effect of compounds on the expression of the ovarian and/or breast antigen gene.

[0414] For example, antibodies, or fragments of antibodies, such as those described herein, may be used to quantitatively or qualitatively detect the presence of ovarian and/or breast antigen gene products or conserved variants or peptide fragments thereof. This can be accomplished, for example, by immunofluorescence techniques employing a fluorescently labeled antibody coupled with light microscopic, flow cytometric, or fluorimetric detection.

[0415] In a preferred embodiment, antibodies, or fragments of antibodies directed to any one or all of the predicted epitope domains of the ovarian and/or breast antigen polypeptides (Shown in Table 1A, column 6) may be used to quantitatively or qualitatively detect the presence of ovarian and/or breast antigen gene products or conserved variants or peptide fragments thereof. This can be accomplished, for example, by immunofluorescence techniques employing a fluorescently labeled antibody coupled with light microscopic, flow cytometric, or fluorimetric detection.

[0416] In an additional preferred embodiment, antibodies, or fragments of antibodies directed to a conformational epitope of an ovarian and/or breast antigen may be used to quantitatively or qualitatively detect the presence of ovarian and/or breast antigen gene products or conserved variants or peptide fragments thereof. This can be accomplished, for example, by immunofluorescence techniques employing a fluorescently labeled antibody coupled with light microscopic, flow cytometric, or fluorimetric detection.

[0417] The antibodies (or fragments thereof), and/or ovarian and/or breast antigen polypeptides of the present invention may, additionally, be employed histologically, as in immunofluorescence, immunoelectron microscopy or non-immunological assays, for in situ detection of ovarian and/or breast antigen gene products or conserved variants or peptide fragments thereof. In situ detection may be accomplished by removing a histological specimen from a patient, and applying thereto a labeled antibody or ovarian and/or breast antigen polypeptide of the present invention. The antibody (or fragment thereof) or ovarian and/or breast antigen polypeptide is preferably applied by overlaying the labeled antibody (or fragment) onto a biological sample. Through the use of such a procedure, it is possible to determine not only the presence of the ovarian and/or breast antigen gene product, or conserved variants or peptide fragments, or ovarian and/or breast antigen polypeptide binding, but also its distribution in the examined tissue. Using the present invention, those of ordinary skill will readily perceive that any of a wide variety of histological methods (such as staining procedures) can be modified in order to achieve such in situ detection.

[0418] Immunoassays and non-immunoassays for ovarian and/or breast antigen gene products or conserved variants or peptide fragments thereof will typically comprise incubating a sample, such as a biological fluid, a tissue extract, freshly harvested cells, or lysates of cells which have been incubated in cell culture, in the presence of a detectably labeled antibody capable of binding ovarian and/or breast antigen gene products or conserved variants or peptide fragments thereof, and detecting the bound antibody by any of a number of techniques well-known in the art.

[0419] The biological sample may be brought in contact with and immobilized onto a solid phase support or carrier such as nitrocellulose, or other solid support which is capable of immobilizing cells, cell particles or soluble proteins. The support may then be washed with suitable buffers followed by treatment with the detectably labeled anti-ovarian and/or breast antigen antibody or detectable ovarian and/or breast antigen polypeptide. The solid phase support may then be washed with the buffer a second time to remove unbound antibody or polypeptide. Optionally the antibody is subsequently labeled. The amount of bound label on solid support may then be detected by conventional means.

[0420] By “solid phase support or carrier” is intended any support capable of binding an antigen or an antibody. Well-known supports or carriers include glass, polystyrene, polypropylene, polyethylene, dextran, nylon, amylases, natural and modified celluloses, polyacrylamides, gabbros, and magnetite. The nature of the carrier can be either soluble to some extent or insoluble for the purposes of the present invention. The support material may have virtually any possible structural configuration so long as the coupled molecule is capable of binding to an antigen or antibody. Thus, the support configuration may be spherical, as in a bead, or cylindrical, as in the inside surface of a test tube, or the external surface of a rod. Alternatively, the surface may be flat such as a sheet, test strip, etc. Preferred supports include polystyrene beads. Those skilled in the art will know many other suitable carriers for binding antibody or antigen, or will be able to ascertain the same by use of routine experimentation.

[0421] The binding activity of a given lot of anti-ovarian and/or breast antigen antibody or ovarian and/or breast antigen polypeptide may be determined according to well known methods. Those skilled in the art will be able to determine operative and optimal assay conditions for each determination by employing routine experimentation.

[0422] In addition to assaying ovarian and/or breast antigen polypeptide levels or polynucleotide levels in a biological sample obtained from an individual, ovarian and/or breast antigen polypeptide or polynucleotide can also be detected in vivo by imaging. For example, in one embodiment of the invention, ovarian and/or breast antigen polypeptide and/or anti-ovarian and/or breast antigen antibodies are used to image ovarian and/or breast system diseased cells, such as neoplasms. In another embodiment, ovarian and/or breast antigen polynucleotides of the invention (e.g., polynucleotides complementary to all or a portion of ovarian and/or breast antigen mRNA) and/or anti-ovarian and/or breast antigen antibodies (e.g., antibodies directed to any one or a combination of the epitopes of ovarian and/or breast antigens, antibodies directed to a conformational epitope of ovarian and/or breast antigens, antibodies directed to the full length polypeptide expressed on the cell surface of a mammalian cell) are used to image diseased or neoplastic cells of the ovaries and/or breast system.

[0423] Antibody labels or markers for in vivo imaging of ovarian and/or breast antigen polypeptides include those detectable by X-radiography, NMR, MRI, CAT-scans or ESR. For X-radiography, suitable labels include radioisotopes such as barium or cesium, which emit detectable radiation but are not overtly harmful to the subject. Suitable markers for NMR and ESR include those with a detectable characteristic spin, such as deuterium, which may be incorporated into the antibody by labeling of nutrients for the relevant hybridoma. Where in vivo imaging is used to detect enhanced levels of ovarian and/or breast antigen polypeptides for diagnosis in humans, it may be preferable to use human antibodies or “humanized” chimeric monoclonal antibodies. Such antibodies can be produced using techniques described herein or otherwise known in the art. For example methods for producing chimeric antibodies are known in the art. See, for review, Morrison, Science 229:1202 (1985); Oi et al., BioTechniques 4:214 (1986); Cabilly et al., U.S. Pat. No. 4,816,567; Taniguchi et al., EP 171496; Morrison et al., EP 173494; Neuberger et al., WO 8601533; Robinson et al., WO 8702671; Boulianne et al., Nature 312:643 (1984); Neuberger et al., Nature 314:268 (1985).

[0424] Additionally, any ovarian and/or breast antigen polypeptides whose presence can be detected, can be administered. For example, ovarian and/or breast antigen polypeptides labeled with a radio-opaque or other appropriate compound can be administered and visualized in vivo, as discussed, above for labeled antibodies. Further such ovarian and/or breast antigen polypeptides can be utilized for in vitro diagnostic procedures.

[0425] An ovarian and/or breast antigen polypeptide-specific antibody or antibody fragment which has been labeled with an appropriate detectable imaging moiety, such as a radioisotope (for example, ¹³¹I, ¹¹²In, ^{99m}Tc), a radio-opaque substance, or a material detectable by nuclear magnetic resonance, is introduced (for example, parenterally, subcutaneously or intraperitoneally) into the mammal to be examined for an ovarian and/or breast disorder. It will be understood in the art that the size of the subject and the imaging system used will determine the quantity of imaging moiety needed to produce diagnostic images. In the case of a radioisotope moiety, for a human subject, the quantity of radioactivity injected will normally range from about 5 to 20 millicuries of ^{99m}Tc. The labeled antibody or antibody fragment will then preferentially accumulate at the location of cells which contain ovarian and/or breast antigen protein. In vivo tumor imaging is described in S. W. Burchiet et al., “Immunopharmacokinetics of Radiolabeled Antibodies and Their Fragments” (Chapter 13 in Tumor Imaging: The Radiochemical Detection of Cancer, S. W. Burchiel and B. A. Rhodes, eds., Masson Publishing Inc. (1982)).

[0426] With respect to antibodies, one of the ways in which the anti-ovarian and/or breast antigen antibody can be detectably labeled is by linking the same to an enzyme and using the linked product in an enzyme immunoassay (EIA) (Voller, A., “The Enzyme Linked Immunosorbent Assay (ELISA)”, 1978, Diagnostic Horizons 2:1-7, Microbiological Associates Quarterly Publication, Walkersville, Md.); Voller et al., J. Clin. Pathol. 31:507-520 (1978); Butler, J. E., Meth. Enzymol. 73:482-523 (1981); Maggio, E. (ed.), 1980, Enzyme Immunoassay, CRC Press, Boca Raton, Fla.,; Ishikawa, E. et al., (eds.), 1981, Enzyme Immunoassay, Kgaku Shoin, Tokyo). The enzyme which is bound to the antibody will react with an appropriate substrate, preferably a chromogenic substrate, in such a manner as to produce a chemical moiety which can be detected, for example, by spectrophotometric, fluorimetric or by visual means. Enzymes which can be used to detectably label the antibody include, but are not limited to, malate dehydrogenase, staphylococcal nuclease, delta-5-steroid isomerase, yeast alcohol dehydrogenase, alpha-glycerophosphate, dehydrogenase, triose phosphate isomerase, horseradish peroxidase, alkaline phosphatase, asparaginase, glucose oxidase, beta-galactosidase, ribonuclease, urease, catalase, glucose-6-phosphate dehydrogenase, glucoamylase and acetylcholinesterase. Additionally, the detection can be accomplished by colorimetric methods which employ a chromogenic substrate for the enzyme. Detection may also be accomplished by visual comparison of the extent of enzymatic reaction of a substrate in comparison with similarly prepared standards.

[0427] Detection may also be accomplished using any of a variety of other immunoassays. For example, by radioactively labeling the antibodies or antibody fragments, it is possible to detect ovarian and/or breast antigens through the use of a radioimmunoassay (RIA) (see, for example, Weintraub, B., Principles of Radioimmunoassays, Seventh Training Course on Radioligand Assay Techniques, The Endocrine Society, March, 1986, which is incorporated by reference herein). The radioactive isotope can be detected by means including, but not limited to, a gamma counter, a scintillation counter, or autoradiography.

[0428] It is also possible to label the antibody with a fluorescent compound. When the fluorescently labeled antibody is exposed to light of the proper wave length, its presence can then be detected due to fluorescence. Among the most commonly used fluorescent labeling compounds are fluorescein isothiocyanate, rhodamine, phycoerythrin, phycocyanin, allophycocyanin, ophthaldehyde and fluorescamine.

[0429] The antibody can also be detectably labeled using fluorescence emitting metals such as ⁵²Eu, or others of the lanthamide series. These metals can be attached to the antibody using such metal chelating groups as diethylenetriaminepentacetic acid (DTPA) or ethylenediaminetetraacetic acid (EDTA).

[0430] The antibody also can be detectably labeled by coupling it to a chemiluminescent compound. The presence of the chemiluminescent-tagged antibody is then determined by detecting the presence of luminescence that arises during the course of a chemical reaction. Examples of particularly useful chemiluminescent labeling compounds are luminol, isoluminol, theromatic acridinium ester, imidazole, acridinium salt and oxalate ester.

[0431] Likewise, a bioluminescent compound may be used to label the antibody of the present invention. Bioluminescence is a type of chemiluminescence found in biological systems in, which a catalytic protein increases the efficiency of the chemiluminescent reaction. The presence of a bioluminescent protein is determined by detecting the presence of luminescence. Important bioluminescent compounds for purposes of labeling are luciferin, luciferase and aequorin.

[0432] Methods for Detecting Ovarian and/or Breast Disease, Including Cancer

[0433] In general, an ovarian and/or breast disease or cancer may be detected in a patient based on the presence of one or more ovarian and/or breast antigen proteins of the invention and/or polynucleotides encoding such proteins in a biological sample (for example, blood, sera, urine, and/or tumor biopsies) obtained from the patient. In other words, such proteins and/or polynucleotides may be used as markers to indicate the presence or absence of an ovarian and/or breast disease or disorder, including cancer. Cancers that may be diagnosed, and/or prognosed using the compositions of the invention include but are not limited to, ovarian and/or breast cancer. In addition, such proteins and/or polynucleotidse may be useful for the detection of other diseases and cancers, including cancers of tissues/cells corresponding to the library source disclosed in column 7 of Table 1A expressing the corresponding ovarian and/or breast sequence disclosed in the same row of Table 1A. The binding agents provided herein generally permit detection of the level of antigen that binds to the agent in the biological sample. Polynucleotide primers and probes may be used to detect the level of mRNA encoding ovarian and/or breast antigen polypeptides, which is also indicative of the presence or absence of an ovarian and/or breast disease or disorder, including cancer. In general, ovarian and/or breast antigen polypeptides should be present at a level that is at least three fold higher in diseased tissue than in normal tissue.

[0434] There are a variety of assay formats known to those of ordinary skill in the art for using a binding agent to detect polypeptide markers in a sample. See, e.g., Harlow and Lane, supra. In general, the presence or absence of an ovarian and/or breast disease in a patient may be determined by (a) contacting a biological sample obtained from a patient with a binding agent; (b) detecting in the sample a level of polypeptide that binds to the binding agent; and (c) comparing the level of polypeptide with a predetermined cut-off value.

[0435] In a preferred embodiment, the assay involves the use of binding agent immobilized on a solid support to bind to and remove the ovarian and/or breast antigen polypeptide of the invention from the remainder of the sample. The bound polypeptide may then be detected using a detection reagent that contains a reporter group and specifically binds to the binding agent/polypeptide complex. Such detection reagents may comprise, for example, a binding agent that specifically binds to the polypeptide or an antibody or other agent that specifically binds to the binding agent, such as an anti-immunoglobulin, protein G, protein A or a lectin. Alternatively, a competitive assay may be utilized, in which a polypeptide is labeled with a reporter group and allowed to bind to the immobilized binding agent after incubation of the binding agent with the sample. The extent to which components of the sample inhibit the binding of the labeled polypeptide to the binding agent is indicative of the reactivity of the sample with the immobilized binding agent. Suitable polypeptides for use within such assays include ovarian and/or breast antigen polypeptides and portions thereof, or antibodies, to which the binding agent binds, as described above.

[0436] The solid support may be any material known to those of skill in the art to which ovarian and/or breast antigen polypeptides of the invention may be attached. For example, the solid support may be a test well in a microtiter plate or a nitrocellulose or other suitable membrane. Alternatively, the support may be a bead or disc, such as glass fiberglass, latex or a plastic material such as polystyrene or polyvinylchloride. The support may also be a magnetic particle or a fiber optic sensor, such as those disclosed, for example, in U.S. Pat. No. 5,359,681. The binding agent may be immobilized on the solid support using a variety of techniques known to those of skill in the art, which are amply described in the patent and scientific literature. In the context of the present invention, the term “immobilization” refers to both noncovalent association, such as adsorption, and covalent attachment (which may be a direct linkage between the agent and functional groups on the support or may be a linkage by way of a cross-linking agent). Immobilization by adsorption to a well in a microtiter plate or to a membrane is preferred. In such cases, adsorption may be achieved by contacting the binding agent, in a suitable buffer, with the solid support for the suitable amount of time. The contact time varies with temperature, but is typically between about 1 hour and about 1 day. In general, contacting a well of plastic microtiter plate (such as polystyrene or polyvinylchloride) with an amount of binding agent ranging from about 10 ng to about 10 ug, and preferably about 100 ng to about 1 ug, is sufficient to immobilize an adequate amount of binding agent.

[0437] Covalent attachment of binding agent to a solid support may generally be achieved by first reacting the support with a bifunctional reagent that will react with both the support and a functional group, such as a hydroxyl or amino group! on the binding agent. For example, the binding agent may be covalently attached to supports having an appropriate polymer coating using benzoquinone or by condensation of an aldehyde group on the support with an amine and an active hydrogen on the binding partner (see, e.g., Pierce Immunotechnology Catalog and Handbook, 1991, at A12-A13).

[0438] Gene Therapy Methods

[0439] Also encompassed by the present invention are gene therapy methods for treating or preventing disorders, diseases and conditions. The gene therapy methods relate to the introduction of nucleic acid (DNA, RNA and antisense DNA or RNA) sequences into an animal to achieve expression of an ovarian and/or breast antigen of the present invention. This method requires a polynucleotide, which codes for a polypeptide of the present invention operatively linked to a promoter and any other genetic elements necessary for the expression of the polypeptide by the target tissue. Such gene therapy and delivery techniques are known in the art, see, for example, WO90/11092, which is herein incorporated by reference.

[0440] Thus, for example, cells from a patient may be engineered with a polynucleotide (DNA or RNA) comprising a promoter operably linked to a polynucleotide of the present invention ex vivo, with the engineered cells then being provided to a patient to be treated with the polypeptide of the present invention. Such methods are well-known in the art. For example, see Belldegrun, A., et al., J. Natl. Cancer Inst. 85: 207-216 (1993); Ferrantini, M. et al., Cancer Research 53: 1107-1112 (1993); Ferrantini, M. et al., J. Immunology 153: 4604-4615 (1994); Kaido, T., et al., Int. J. Cancer 60: 221-229 (1995); Ogura, H., et al., Cancer Research 50: 5102-5106 (1990); Santodonato, L., et al., Human Gene Therapy 7:1-10 (1996); Santodonato, L., et al., Gene Therapy 4:1246-1255 (1997); and Zhang, J.-F. et al., Cancer Gene Therapy 3: 31-38 (1996)), which are herein incorporated by reference. In one embodiment, the cells which are engineered are arterial cells. The arterial cells may be reintroduced into the patient through direct injection to the artery, the tissues surrounding the artery, or through catheter injection.

[0441] As discussed in more detail below, the polynucleotide constructs can be delivered by any method that delivers injectable materials to the cells of an animal, such as, injection into the interstitial space of tissues (heart, muscle, skin, lung, liver, and the like). The polynucleotide constructs may be delivered in a pharmaceutically acceptable liquid or aqueous carrier.

[0442] In one embodiment, the polynucleotide of the present invention is delivered as a naked polynucleotide. The term “naked” polynucleotide, DNA or RNA refers to sequences that are free from any delivery vehicle that acts to assist, promote or facilitate entry into the cell, including viral sequences, viral particles, liposome formulations, lipofectin or precipitating agents and the like. However, the polynucleotide of the present invention can also be delivered in liposome formulations and lipofectin formulations and the like can be prepared by methods well known to those skilled in the art. Such methods are described, for example, in U.S. Pat. Nos. 5,593,972, 5,589,466, and 5,580,859, which are herein incorporated by reference.

[0443] The polynucleotide vector constructs used in the gene therapy method are preferably constructs that will not integrate into the host genome nor will they contain sequences that allow for replication. Appropriate vectors include pWLNEO, pSV2CAT, pOG44, pXT1 and pSG available from Stratagene; pSVK3, pBPV, pMSG and pSVL available from Pharmacia; and pEF1/V5, pcDNA3.1, and pRc/CMV2 available from Invitrogen. Other suitable vectors will be readily apparent to the skilled artisan.

[0444] Any strong promoter known to those skilled in the art can be used for driving the expression of the polynucleotide sequence. Suitable promoters include adenoviral promoters, such as the adenoviral major late promoter; or heterologous promoters, such as the cytomegalovirus (CMV) promoter; the respiratory syncytial virus (RSV) promoter; inducible promoters, such as the MMT promoter, the metallothionein promoter; heat shock promoters; the albumin promoter; the ApoI promoter; human globin promoters; viral thymidine kinase promoters, such as the Herpes Simplex thymidine kinase promoter; retroviral LTRs; the b-actin promoter; and human growth hormone promoters. The promoter also may be the native promoter for the polynucleotide of the present invention.

[0445] Unlike other gene therapy techniques, one major advantage of introducing naked nucleic acid sequences into target cells is the transitory nature of the polynucleotide synthesis in the cells. Studies have shown that non-replicating DNA sequences can be introduced into cells to provide production of the desired polypeptide for periods of up to six months.

[0446] The polynucleotide construct can be delivered to the interstitial space of tissues within the an animal, including of muscle, skin, brain, lung, liver, spleen, bone marrow, thymus, heart, lymph, blood, bone, cartilage, pancreas, kidney, gall bladder, stomach, intestine, testis, ovary, uterus, rectum, nervous system, eye, gland, and connective tissue. Interstitial space of the tissues comprises the intercellular, fluid, mucopolysaccharide matrix among the reticular fibers of organ tissues, elastic fibers in the walls of vessels or chambers, collagen fibers of fibrous tissues, or that same matrix within connective tissue ensheathing muscle cells or in the lacunae of bone. It is similarly the space occupied by the plasma of the circulation and the lymph fluid of the lymphatic channels. Delivery to the interstitial space of muscle tissue is preferred for the reasons discussed below. They may be conveniently delivered by injection into the tissues comprising these cells. They are preferably delivered to and expressed in persistent, non-dividing cells which are differentiated, although delivery and expression may be achieved in non-differentiated or less completely differentiated cells, such as, for example, stem cells of blood or skin fibroblasts. In vivo muscle cells are particularly competent in their ability to take up and express polynucleotides.

[0447] For the naked nucleic acid sequence injection, an effective dosage amount of DNA or RNA will be in the range of from about 0.05 mg/kg body weight to about 50 mg/kg body weight. Preferably the dosage will be from about 0.005 mg/kg to about 20 mg/kg and more preferably from about 0.05 mg/kg to about 5 mg/kg. Of course, as the artisan of ordinary skill will appreciate, this dosage will vary according to the tissue site of injection. The appropriate and effective dosage of nucleic acid sequence can readily be determined by those of ordinary skill in the art and may depend on the condition being treated and the route of administration.

[0448] The preferred route of administration is by the parenteral route of injection into the interstitial space of tissues. However, other parenteral routes may also be used, such as, inhalation of an aerosol formulation particularly for delivery to lungs or bronchial tissues, throat or mucous membranes of the nose. In addition, naked DNA constructs can be delivered to arteries during angioplasty by the catheter used in the procedure.

[0449] The naked polynucleotides are delivered by any method known in the art, including, but not limited to, direct needle injection at the delivery site, intravenous injection, topical administration, catheter infusion, and so-called “gene guns”. These delivery methods are known in the art.

[0450] The constructs may also be delivered with delivery vehicles such as viral sequences, viral particles, liposome formulations, lipofectin, precipitating agents, etc. Such methods of delivery are known in the art.

[0451] In certain embodiments, the polynucleotide constructs are complexed in a liposome preparation. Liposomal preparations for use in the instant invention include cationic (positively charged), anionic (negatively charged) and neutral preparations. However, cationic liposomes are particularly preferred because a tight charge complex can be formed between the cationic liposome and the polyanionic nucleic acid. Cationic liposomes have been shown to mediate intracellular delivery of plasmid DNA (Felgner et al., Proc. Natl. Acad. Sci. USA (1987) 84:7413-7416, which is herein incorporated by reference); mRNA (Malone et al., Proc. Natl. Acad. Sci. USA (1989) 86:6077-6081, which is herein incorporated by reference); and purified transcription factors (Debs et al., J. Biol. Chem. (1990) 265:10189-10192, which is herein incorporated by reference), in functional form.

[0452] Cationic liposomes are readily available. For example, N[1-2,3-dioleyloxy)propyl]-N,N,N-triethylammonium (DOTMA) liposomes are particularly useful and are available under the trademark Lipofectin, from GIBCO BRL, Grand Island, N.Y., (see, also, Felgner et al., Proc. Natl. Acad. Sci. USA (1987) 84:7413-7416, which is herein incorporated by reference). Other commercially available liposomes include transfectace (DDAB/DOPE) and DOTAP/DOPE (Boehringer).

[0453] Other cationic liposomes can be prepared from readily available materials using techniques well known in the art. See, e.g. PCT Publication No. WO 90/11092 (which is herein incorporated by reference) for a description of the synthesis of DOTAP (1,2-bis(oleoyloxy)-3-(trimethylammonio)propane) liposomes. Preparation of DOTMA liposomes is explained in the literature, see, e.g., P. Felgner et al., Proc. Natl. Acad. Sci. USA 84:7413-7417, which is herein incorporated by reference. Similar methods can be used to prepare liposomes from other cationic lipid materials.

[0454] Similarly, anionic and neutral liposomes are readily available, such as from Avanti Polar Lipids (Birmingham, Ala.), or can be easily prepared using readily available materials. Such materials include phosphatidyl choline, cholesterol, phosphatidyl ethanolamine, dioleoylphosphatidyl choline (DOPC), dioleoylphosphatidyl glycerol (DOPG), dioleoylphoshatidyl ethanolamine (DOPE), among others. These materials can also be mixed with the DOTMA and DOTAP starting materials in appropriate ratios. Methods for making liposomes using these materials are well known in the art.

[0455] For example, commercially dioleoylphosphatidyl choline (DOPC), dioleoylphosphatidyl glycerol (DOPG), and dioleoylphosphatidyl ethanolamine (DOPE) can be used in various combinations to make conventional liposomes, with or without the addition of cholesterol. Thus, for example, DOPG/DOPC vesicles can be prepared by drying 50 mg each of DOPG and DOPC under a stream of nitrogen gas into a sonication vial. The sample is placed under a vacuum pump overnight and is hydrated the following day with deionized water. The sample is then sonicated for 2 hours in a capped vial, using a Heat Systems model 350 sonicator equipped with an inverted cup (bath type) probe at the maximum setting while the bath is circulated at 15EC. Alternatively, negatively charged vesicles can be prepared without sonication to produce multilamellar vesicles or by extrusion through nucleopore membranes to produce unilamellar vesicles of discrete size. Other methods are known and available to those of skill in the art.

[0456] The liposomes can comprise multilamellar vesicles (MLVs), small unilamellar vesicles (SUVs), or large unilamellar vesicles (LUVs), with SUVs being preferred. The various liposome-nucleic acid complexes are prepared using methods well known in the art. See, e.g., Straubinger et al., Methods of Immunology (1983), 101:512-527, which is herein incorporated by reference. For example, MLVs containing nucleic acid can be prepared by depositing a thin film of phospholipid on the walls of a glass tube and subsequently hydrating with a solution of the material to be encapsulated. SUVs are prepared by extended sonication of MLVs to produce a homogeneous population of unilamellar liposomes. The material to be entrapped is added to a suspension of preformed MLVs and then sonicated. When using liposomes containing cationic lipids, the dried lipid film is resuspended in an appropriate solution such as sterile water or an isotonic buffer solution such as 10 mM Tris/NaCl, sonicated, and then the preformed liposomes are mixed directly with the DNA. The liposome and DNA form a very stable complex due to binding of the positively charged liposomes to the cationic DNA. SUVs find use with small nucleic acid fragments. LUVs are prepared by a number of methods, well known in the art. Commonly used methods include Ca²⁺-EDTA chelation (Papahadjopoulos et al., Biochim. Biophys. Acta (1975) 394:483; Wilson et al., Cell 17:77 (1979); ether injection (Deamer, D. and Bangham, A., Biochim. Biophys. Acta 443:629 (1976); Ostro et al., Biochem. Biophys. Res. Commun. 76:836 (1977); Fraley et al., Proc. Natl. Acad. Sci. USA 76:3348 (1979)); detergent dialysis (Enoch, H. and Strittmatter, P., Proc. Natl. Acad. Sci. USA 76:145 (1979)); and reverse-phase evaporation (REV) (Fraley et al., J. Biol. Chem. 255:10431 (1980); Szoka et al., Proc. Natl. Acad. Sci. USA 75:145 (1978); Schaefer-Ridder et al., Science 215:166 (1982)), which are herein incorporated by reference.

[0457] Generally, the ratio of DNA to liposomes will be from about 10:1 to about 1:10. Preferably, the ration will be from about 5:1 to about 1:5. More preferably, the ration will be about 3:1 to about 1:3. Still more preferably, the ratio will be about 1:1.

[0458] U.S. Pat. No. 5,676,954 (which is herein incorporated by reference) reports on the injection of genetic material, complexed with cationic liposomes carriers, into mice. U.S. Pat. Nos. 4,897,355, 4,946,787, 5,049,386, 5,459,127, 5,589,466, 5,693,622, 5,580,859, 5,703,055, and international publication no. WO 94/9469 (which are herein incorporated by reference) provide cationic lipids for use in transfecting DNA into cells and mammals. U.S. Pat. Nos. 5,589,466, 5,693,622, 5,580,859, 5,703,055, and International Publication No. WO 94/9469 provide methods for delivering DNA-cationic lipid complexes to mammals.

[0459] In certain embodiments, cells are engineered, ex vivo or in vivo, using a retroviral particle containing RNA which comprises a sequence encoding a polypeptide of the present invention. Retroviruses from which the retroviral plasmid vectors may be derived include, but are not limited to, Moloney Murine Leukemia Virus, spleen necrosis virus, Rous sarcoma Virus, Harvey Sarcoma Virus, avian leukosis virus, gibbon ape leukemia virus, human immunodeficiency virus, Myeloproliferative Sarcoma Virus, and mammary tumor virus.

[0460] The retroviral plasmid vector is employed to transduce packaging cell lines to form producer cell lines. Examples of packaging cells which may be transfected include, but are not limited to, the PE501, PA317, R-2, R-AM, PA12, T19-14×, VT-19-17-H2, RCRE, RCRIP, GP+E-86, GP+envAm12, and DAN cell lines as described in Miller, Human Gene Therapy 1:5-14 (1990), which is incorporated herein by reference in its entirety. The vector may transduce the packaging cells through any means known in the art. Such means include, but are not limited to, electroporation, the use of liposomes, and CaPO₄ precipitation. In one alternative, the retroviral plasmid vector may be encapsulated into a liposome, or coupled to a lipid, and then administered to a host.

[0461] The producer cell line generates infectious retroviral vector particles which include polynucleotide encoding a polypeptide of the present invention. Such retroviral vector particles then may be employed, to transduce eukaryotic cells, either in vitro or in vivo. The transduced eukaryotic cells will express a polypeptide of the present invention.

[0462] In certain other embodiments, cells are engineered, ex vivo or in vivo, with polynucleotide contained in an adenovirus vector. Adenovirus can be manipulated such that it encodes and expresses a polypeptide of the present invention, and at the same time is inactivated in terms of its ability to replicate in a normal lytic viral life cycle. Adenovirus expression is achieved without integration of the viral DNA into the host cell chromosome, thereby alleviating concerns about insertional mutagenesis. Furthermore, adenoviruses have been used as live enteric vaccines for many years with an excellent safety profile (Schwartz, et al., Am. Rev. Respir. Dis. 109:233-238 (1974)). Finally, adenovirus mediated gene transfer has been demonstrated in a number of instances including transfer of alpha-1-antitrypsin and CFTR to the lungs of cotton rats (Rosenfeld et al., Science 252:431-434 (1991); Rosenfeld et al., Cell 68:143-155 (1991)). Furthermore, extensive studies to attempt to establish adenovirus as a causative agent in human cancer were uniformly negative (Green et al., Proc. Natl. Acad. Sci. USA 76:6606 (1979)).

[0463] Suitable adenoviral vectors useful in the present invention are described, for example, in Kozarsky and Wilson, Curr. Opin. Genet. Devel. 3:499-503 (1993); Rosenfeld et al., Cell 68:143-155 (1992); Engelhardt et al., Human Genet. Ther. 4:759-769 (1993); Yang et al., Nature Genet. 7:362-369 (1994); Wilson et al., Nature 365:691-692 (1993); and U.S. Pat. No. 5,652,224, which are herein incorporated by reference. For example, the adenovirus vector Ad2 is useful and can be grown in human 293 cells. These cells contain the E1 region of adenovirus and constitutively express E1a and E1b, which complement the defective adenoviruses by providing the products of the genes deleted from the vector. In addition to Ad2, other varieties of adenovirus (e.g., Ad3, Ad5, and Ad7) are also useful in the present invention.

[0464] Preferably, the adenoviruses used in the present invention are replication deficient. Replication deficient adenoviruses require the aid of a helper virus and/or packaging cell line to form infectious particles. The resulting virus is capable of infecting cells and can express a polynucleotide of interest which is operably linked to a promoter, but cannot replicate in most cells. Replication deficient adenoviruses may be deleted in one or more of all or a portion of the following genes: E1a, E1b, E3, E4, E2a, or L1 through L5.

[0465] In certain other embodiments, the cells are engineered, ex vivo or in vivo, using an adeno-associated virus (AAV). AAVs are naturally occurring defective viruses that require helper viruses to produce infectious particles (Muzyczka, N., Curr. Topics in Microbiol. Immunol. 158:97 (1992)). It is also one of the few viruses that may integrate its DNA into non-dividing cells. Vectors containing as little as 300 base pairs of AAV can be packaged and can integrate, but space for exogenous DNA is limited to about 4.5 kb. Methods for producing and using such AAVs are known in the art. See, for example, U.S. Pat. Nos. 5,139,941, 5,173,414, 5,354,678, 5,436,146, 5,474,935, 5,478,745, and 5,589,377.

[0466] For example, an appropriate AAV vector for use in the present invention will include all the sequences necessary for DNA replication, encapsidation, and host-cell integration. The polynucleotide construct is inserted into the AAV vector using standard cloning methods, such as those found in Sambrook et al., Molecular Cloning: A Laboratory Manual, Cold Spring Harbor Press (1989). The recombinant AAV vector is then transfected into packaging cells which are infected with a helper virus, using any standard technique, including lipofection, electroporation, calcium phosphate precipitation, etc. Appropriate helper viruses include adenoviruses, cytomegaloviruses, vaccinia viruses, or herpes viruses. Once the packaging cells are transfected and infected, they will produce infectious AAV viral particles which contain the polynucleotide construct. These viral particles are then used to transduce eukaryotic cells, either ex vivo or in vivo. The transduced cells will contain the polynucleotide construct integrated into its genome, and will express a polypeptide of the invention.

[0467] Another method of gene therapy involves operably associating heterologous control regions and endogenous ovarian and/or breast antigen polynucleotide sequences (e.g., encoding an ovarian and/or breast antigen polypeptide of the present invention) via homologous recombination (see, e.g., U.S. Pat. No. 5,641,670, issued Jun. 24, 1997; International Publication No. WO 96/29411, published Sep. 26, 1996; International Publication No. WO 94/12650, published Aug. 4, 1994; Koller et al., Proc. Natl. Acad. Sci. USA 86:8932-8935 (1989); and Zijlstra et al., Nature 342:435-438 (1989), which are herein incorporated by reference. This method involves the activation of a gene which is present in the target cells, but which is not normally expressed in the cells, or is expressed at a lower level than desired.

[0468] Polynucleotide constructs are made, using standard techniques known in the art, which contain the promoter with targeting sequences flanking the promoter. Suitable promoters are described herein. The targeting sequence is sufficiently complementary to an endogenous sequence to permit homologous recombination of the promoter-targeting sequence with the endogenous sequence. The targeting sequence will be sufficiently near the 5′ end of the desired endogenous polynucleotide sequence so the promoter will be operably linked to the endogenous sequence upon homologous recombination.

[0469] The promoter and the targeting sequences can be amplified using PCR. Preferably, the amplified promoter contains distinct restriction enzyme sites on the 5′ and 3′ ends. Preferably, the 3′ end of the first targeting sequence contains the same restriction enzyme site as the 5′ end of the amplified promoter and the 5′ end of the second targeting sequence contains the same restriction site as the 3′ end of the amplified promoter. The amplified promoter and targeting sequences are digested and ligated together.

[0470] The promoter-targeting sequence construct is delivered to the cells, either as naked polynucleotide, or in conjunction with transfection-facilitating agents, such as liposomes, viral sequences, viral particles, whole viruses, lipofection, precipitating agents, etc., described in more detail above. The P promoter-targeting sequence can be delivered by any method, included direct needle injection, intravenous injection, topical administration, catheter infusion, particle accelerators, etc. The methods are described in more detail below.

[0471] The promoter-targeting sequence construct is taken up by cells. Homologous recombination between the construct and the endogenous sequence takes place, such that an endogenous sequence is placed under the control of the promoter. The promoter then drives the expression of the endogenous sequence.

[0472] The polynucleotide encoding a polypeptide of the present invention may contain a secretory signal sequence that facilitates secretion of the protein. Typically, the signal sequence is positioned in the coding region of the polynucleotide to be expressed towards or at the 5′ end of the coding region. The signal sequence may be homologous or heterologous to the ovarian and/or breast antigen polynucleotide of interest and may be homologous or heterologous to the cells to be transfected. Additionally, the signal sequence may be chemically synthesized using methods known in the art.

[0473] Any mode of administration of any of the above-described polynucleotides constructs can be used so long as the mode results in the expression of one or more molecules in an amount sufficient to provide a therapeutic effect. This includes direct needle injection, systemic injection, catheter infusion, biolistic injectors, particle accelerators (i.e., “gene guns”), gelfoam sponge depots, other commercially available depot materials, osmotic pumps (e.g., Alza minipumps), oral or suppositorial solid (tablet or pill) pharmaceutical formulations, and decanting or topical applications during surgery. For example, direct injection of naked calcium phosphate-precipitated plasmid into rat liver and rat spleen or a protein-coated plasmid into the portal vein has resulted in gene expression of the foreign gene in the rat livers (Kaneda et al., Science 243:375 (1989)).

[0474] A preferred method of local administration is by direct injection. Preferably, a recombinant molecule of the present invention complexed with a delivery vehicle is administered by direct injection into or locally within the area of arteries. Administration of a composition locally within the area of arteries refers to injecting the composition centimeters and preferably, millimeters within arteries.

[0475] Another method of local administration is to contact a polynucleotide construct of the present invention in or around a surgical wound. For example, a patient can undergo surgery and the polynucleotide construct can be coated on the surface of tissue inside the wound or the construct can be injected into areas of tissue inside the wound.

[0476] Therapeutic compositions useful in systemic administration, include recombinant molecules of the present invention complexed to a targeted delivery vehicle of the present invention. Suitable delivery vehicles for use with systemic administration comprise liposomes comprising ligands for targeting the vehicle to a particular site. In specific embodiments, suitable delivery vehicles for use with systemic administration comprise liposomes comprising polypeptides of the invention for targeting the vehicle to a particular site.

[0477] Preferred methods of systemic administration, include intravenous injection, aerosol, oral and percutaneous (topical) delivery. Intravenous injections can be performed using methods standard in the art. Aerosol delivery can also be performed using methods standard in the art (see, for example, Stribling et al., Proc. Natl. Acad. Sci. USA 189:11277-11281, 1992, which is incorporated herein by reference). Oral delivery can be performed by complexing a polynucleotide construct of the present invention to a carrier capable of withstanding degradation by digestive enzymes in the gut of an animal. Examples of such carriers, include plastic capsules or tablets, such as those known in the art. Topical delivery can be performed by mixing a polynucleotide construct of the present invention with a lipophilic reagent (e.g., DMSO) that is capable of passing into the skin.

[0478] Determining an effective amount of substance to be delivered can depend upon a number of factors including, for example, the chemical structure and biological activity of the substance, the age and weight of the animal, the precise condition requiring treatment and its severity, and the route of administration. The frequency of treatments depends upon a number of factors, such as the amount of polynucleotide constructs administered per dose, as well as the health and history of the subject. The precise amount, number of doses, and timing of doses will be determined by the attending physician or veterinarian.

[0479] Therapeutic compositions of the present invention can be administered to any animal, preferably to mammals and birds. Preferred mammals include humans, dogs, cats, mice, rats, rabbits sheep, cattle, horses and pigs, with humans being particularly preferred.

[0480] Biological Activities

[0481] Polynucleotides or polypeptides, or agonists or antagonists of the present invention, can be used in assays to test for one or more biological activities. If these polynucleotides or polypeptides, or agonists or antagonists of the present invention, do exhibit activity in a particular assay, it is likely that these molecules may be involved in the diseases associated with the biological activity. Thus, the polynucleotides and polypeptides, and agonists or antagonists could be used to treat, prevent diagnose and/or prognose the associated disease.

[0482] The ovarian and/or breast antigen polynucleotides and polypeptides of the invention are predicted to have predominant expression in ovarian and/or breast tissues.

[0483] Thus, the ovarian and/or breast antigens of the invention may be useful as therapeutic molecules. Each would be useful for diagnosis, detection, treatment and/or prevention of diseases or disorders of the ovaries and/or breast, neoplastic disorders (e.g., ovarian Krukenberg tumor, malignant mixed Mullerian tumors, and/or as described under “Hyperproliferative Disorders” below), infectious diseases (e.g., mastitis, oophoritis, and/or as described under “Infectious Diseases” below), and inflammatory diseases (e.g., abcesses and/or as described under “Immune Disorders” below), and as described under “Reproductive System Disorders” below.

[0484] In a preferred embodiment, polynucleotides of the invention (e.g., a nucleic acid sequence of SEQ ID NO:X or the complement thereof, or the cDNA sequence contained in Clone ID NO:Z, or fragments or variants thereof) and/or polypeptides of the invention (e.g., an amino acid sequence contained in SEQ ID NO:Y, an amino acid sequence encoded by SEQ ID NO:X, or the complement threof, an amino acid sequence encoded by the cDNA sequence contained in Clone ID NO:Z and fragments or variants thereof as described herein) are useful for the diagnosis, detection, treatement, and/or prevention of diseases or disorders of the tissues/cells corresponding to the library source disclosed in column 7 of Table 1A expressing the corresponding ovarian and/or breast sequence disclosed in the same row of Table 1A. In certain embodiments, a polypeptide of the invention, or polynucleotides, antibodies, agonists, or antagonists corresponding to that polypeptide, may be used to diagnose and/or prognose diseases and/or disorders associated with the tissue(s) in which the polypeptide of the invention is expressed, including one, two, three, four, five, or more tissues disclosed in Table 1A, column 7 (Tissue Distribution Library Code).

[0485] Particularly, the ovarian and/or breast antigens may be a useful therapeutic for ovarian and/or breast cancer. Treatment, diagnosis, detection, and/or prevention of ovarian and/or breast disorders could be carried out using an ovarian and/or breast antigen or soluble form of an ovarian and/or breast antigen, an ovarian and/or breast antigen ligand, gene therapy, or ex vivo applications. Moreover, inhibitors of an ovarian and/or breast antigen, either blocking antibodies or mutant forms, could modulate the expression of the ovarian and/or breast antigen. These inhibitors may be useful to treat, diagnose, detect, and/or prevent diseases associated with the misregulation of an ovarian and/or breast antigen.

[0486] In one embodiment, the invention provides a method for the specific delivery of compositions of the invention to cells (e.g., normal or diseased ovarian and/or breast cells) by administering polypeptides of the invention (e.g., ovarian and/or breast antigen polypeptides or anti-ovarian and/or breast antigen antibodies) that are associated with heterologous polypeptides or nucleic acids. In one example, the invention provides a method for delivering a therapeutic protein into the targeted cell (e.g., an aberrant ovarian and/or breast cell or ovarian and/or breast cancer cell). In another example, the invention provides a method for delivering a single stranded nucleic acid (e.g., antisense or ribozymes) or double stranded nucleic acid (e.g., DNA that can integrate into the cell's genome or replicate episomally and that can be transcribed) into the targeted cell.

[0487] In another embodiment, the invention provides a method for the specific destruction of cells (e.g., the destruction of aberrant ovarian and/or breast cells, including, but not limited to, ovarian and/or breast tumor cells) by administering polypeptides of the invention (e.g., ovarian and/or breast antigen polypeptides or fragments thereof, or anti-ovarian and/or breast antigen antibodies) in association with toxins or cytotoxic prodrugs.

[0488] By “toxin” is meant compounds that bind and activate endogenous cytotoxic effector systems, radioisotopes, holotoxins, modified toxins, catalytic subunits of toxins, cytotoxins (cytotoxic agents), or any molecules or enzymes not normally present in or on the surface of a cell that under defined conditions cause the cell's death. Toxins that may be used according to the methods of the invention include, but are not limited to, radioisotopes known in the art, compounds such as, for example, antibodies (or complement fixing containing portions thereof) that bind an inherent or induced endogenous cytotoxic effector system, thymidine kinase, endonuclease, RNAse, alpha toxin, ricin, abrin, Pseudomonas exotoxin A, diphtheria toxin, saporin, momordin, gelonin, pokeweed antiviral protein, alpha-sarcin and cholera toxin. “Toxin” also includes a cytostatic or cytocidal agent, a therapeutic agent or a radioactive metal ion, e.g., alpha-emitters such as, for example, ²¹³Bi, or other radioisotopes such as, for example, ¹⁰³Pd, ¹³³Xe, ¹³¹I, ⁶⁸Ge, ⁵⁷Co, ⁶⁵Zn, ⁸⁵Sr, ³²P, ³⁵S, ⁹⁰Y, ¹⁵³Sm, ¹⁵³Gd, ¹⁶⁹Yb, ⁵¹Cr, ⁵⁴Mn ⁷⁵Se, ¹¹³Sn, ⁹⁰Yttrium, ¹¹⁷Tin, ¹⁸⁶Rhenium, ¹⁶⁶Holmium, and ¹⁸⁸Rhenium; luminescent labels, such as luminol; and fluorescent labels, such as fluorescein and rhodamine, and biotin.

[0489] Techniques known in the art may be applied to label antibodies of the invention. Such techniques include, but are not limited to, the use of bifunctional conjugating agents (see e.g., U.S. Pat. Nos. 5,756,065; 5,714,631; 5,696,239; 5,652,361; 5,505,931; 5,489,425; 5,435,990; 5,428,139; 5,342,604; 5,274,119; 4,994,560; and 5,808,003; the contents of each of which are hereby incorporated by reference in its entirety). A cytotoxin or cytotoxic agent includes any agent that is detrimental to cells. Examples include paclitaxol, cytochalasin B, gramicidin D, ethidium bromide, emetine, mitomycin, etoposide, tenoposide, vincristine, vinblastine, colchicin, doxorubicin, daunorubicin, dihydroxy anthracin dione, mitoxantrone, mithramycin, actinomycin D, 1-dehydrotestosterone, glucocorticoids, procaine, tetracaine, lidocaine, propranolol, and puromycin and analogs or homologs thereof. Therapeutic agents include, but are not limited to, antimetabolites (e.g., methotrexate, 6-mercaptopurine, 6-thioguanine, cytarabine, 5-fluorouracil decarbazine), alkylating agents (e.g., mechlorethamine, thioepa chlorambucil, melphalan, carmustine (BSNU) and lomustine (CCNU), cyclothosphamide, busulfan, dibromomannitol, streptozotocin, mitomycin C, and cis-dichlorodiamine platinum (II) (DDP) cisplatin), anthracyclines (e.g., daunorubicin (formerly daunomycin) and doxorubicin), antibiotics (e.g., dactinomycin (formerly actinomycin), bleomycin, mithramycin, and anthramycin (AiMC)), and anti-mitotic agents (e.g., vincristine and vinblastine).

[0490] By “cytotoxic prodrug” is meant a non-toxic compound that is converted by an enzyme, normally present in the cell, into a cytotoxic compound. Cytotoxic prodrugs that may be used according to the methods of the invention include, but are not limited to, glutamyl derivatives of benzoic acid mustard alkylating agent, phosphate derivatives of etoposide or mitomycin C, cytosine arabinoside, daunorubisin, and phenoxyacetamide derivatives of doxorubicin.

[0491] It will be appreciated that conditions caused by a decrease in the standard or normal level of an ovarian and/or breast antigen activity in an individual, particularly disorders of the ovaries and/or breast, can be treated by administration of an ovarian and/or breast antigen polypeptide (e.g., such as, for example, the complete ovarian and/or breast antigen polypeptide, the soluble form of the extracellular domain of an ovarian and/or breast antigen polypeptide, or cells expressing the complete protein) or agonist. Thus, the invention also provides a method of treatment of an individual in need of an increased level of ovarian and/or breast antigen activity comprising administering to such an individual a pharmaceutical composition comprising an amount of an isolated ovarian and/or breast antigen polypeptide of the invention, or agonist thereof (e.g., an agonistic anti-ovarian and/or breast antigen antibody), effective to increase the ovarian and/or breast antigen activity level in such an individual.

[0492] It will also be appreciated that conditions caused by a increase in the standard or normal level of ovarian and/or breast antigen activity in an individual, particularly disorders of the ovaries and/or breast, can be treated by administration of ovarian and/or breast antigen polypeptides (e.g., such as, for example, the complete ovarian and/or breast antigen polypeptide, the soluble form of the extracellular domain of an ovarian and/or breast antigen polypeptide, or cells expressing the complete protein) or antagonist (e.g., an antagonistic ovarian and/or breast antigen antibody). Thus, the invention also provides a method of treatment of an individual in need of an decreased level of ovarian and/or breast antigen activity comprising administering to such an individual a pharmaceutical composition comprising an amount of an isolated ovarian and/or breast antigen polypeptide of the invention, or antagonist thereof (e.g., an antagonistic anti-ovarian and/or breast antigen antibody), effective to decrease the ovarian and/or breast antigen activity level in such an individual.

[0493] More generally, polynucleotides, translation products and antibodies corresponding to this gene may be useful for the diagnosis, prognosis, prevention, and/or treatment of diseases and/or disorders associated with the following systems.

[0494] Reproductive System Disorders

[0495] The polynucleotides or polypeptides, or agonists or antagonists of the invention may be used for the diagnosis, treatment, or prevention of diseases and/or disorders of the reproductive system. Reproductive system disorders that can be treated by the compositions of the invention, include, but are not limited to, reproductive system injuries, infections, neoplastic disorders, congenital defects, and diseases or disorders which result in infertility, complications with pregnancy, labor, or parturition, and postpartum difficulties.

[0496] Reproductive system disorders and/or diseases include diseases and/or disorders of the testes, including, but not limited to, testicular atrophy, testicular feminization, cryptorchism (unilateral and bilateral), anorchia, ectopic testis, epididymitis and orchitis (typically resulting from infections such as, for example, gonorrhea, mumps, tuberculosis, and syphilis), testicular torsion, vasitis nodosa, germ cell tumors (e.g., seminomas, embryonal cell carcinomas, teratocarcinomas, choriocarcinomas, yolk sac tumors, and teratomas), stromal tumors (e.g., Leydig cell tumors), hydrocele, hematocele, varicocele, spermatocele, inguinal hernia, and disorders of sperm production (e.g., immotile cilia syndrome, aspermia, asthenozoospermia, azoospermia, oligospermia, and teratozoospermia).

[0497] Reproductive system disorders also include, but are not limited to, disorders of the prostate gland, such as acute non-bacterial prostatitis, chronic non-bacterial prostatitis, acute bacterial prostatitis, chronic bacterial prostatitis, prostatodystonia, prostatosis, granulomatous prostatitis, malacoplakia, benign prostatic hypertrophy or hyperplasia, and prostate neoplastic disorders, including adenocarcinomas, transitional cell carcinomas, ductal carcinomas, and squamous cell carcinomas.

[0498] Additionally, the compositions of the invention may be useful in the diagnosis, treatment, and/or prevention of disorders or diseases of the penis and urethra, including, but not limited to, inflammatory disorders, such as balanoposthitis, balanitis xerotica obliterans, phimosis, paraphimosis, syphilis, herpes simplex virus, gonorrhea, non-gonococcal urethritis, chlamydia, mycoplasma, trichomonas, HIV, AIDS, Reiter's syndrome, condyloma acuminatum, condyloma latum, and pearly penile papules; urethral abnormalities, such as hypospadias, epispadias, and phimosis; premalignant lesions, including Erythroplasia of Queyrat, Bowen's disease, Bowenoid paplosis, giant condyloma of Buscke-Lowenstein, and varrucous carcinoma; penile cancers, including squamous cell carcinomas, carcinoma in situ, verrucous carcinoma, and disseminated penile carcinoma; urethral neoplastic disorders, including penile urethral carcinoma, bulbomembranous urethral carcinoma, and prostatic urethral carcinoma; and erectile disorders, such as priapism, Peyronie's disease, erectile dysfunction, and impotence.

[0499] Moreover, diseases and/or disorders of the vas deferens include, but are not limited to, vasculititis and CBAVD (congenital bilateral absence of the vas deferens); additionally, the polynucleotides, polypeptides, and agonists or antagonists of the present invention may be used in the diagnosis, treatment, and/or prevention of diseases and/or disorders of the seminal vesicles, including but not limited to, hydatid disease, congenital chloride diarrhea, and polycystic kidney disease.

[0500] Other disorders and/or diseases of the male reproductive system that may be diagnosed, treated, and/or prevented with the compositions of the invention include, but are not limited to, Klinefelter's syndrome, Young's syndrome, premature ejaculation, diabetes mellitus, cystic fibrosis, Kartagener's syndrome, high fever, multiple sclerosis, and gynecomastia.

[0501] Further, the polynucleotides, polypeptides, and agonists or antagonists of the present invention may be used in the diagnosis, treatment, and/or prevention of diseases and/or disorders of the vagina and vulva, including, but not limited to, bacterial vaginosis, candida vaginitis, herpes simplex virus, chancroid, granuloma inguinale, lymphogranuloma venereum, scabies, human papillomavirus, vaginal trauma, vulvar trauma, adenosis, chlamydia vaginitis, gonorrhea, trichomonas vaginitis, condyloma acuminatum, syphilis, molluscum contagiosum, atrophic vaginitis, Paget's disease, lichen sclerosus, lichen planus, vulvodynia, toxic shock syndrome, vaginismus, vulvovaginitis, vulvar vestibulitis, and neoplastic disorders, such as squamous cell hyperplasia, clear cell carcinoma, basal cell carcinoma, melanomas, cancer of Bartholin's gland, and vulvar intraepithelial neoplasia.

[0502] Disorders and/or diseases of the uterus that may be diagnosed, treated, and/or prevented with the compositions of the invention include, but are not limited to, dysmenorrhea, retroverted uterus, endometriosis, fibroids, adenomyosis, anovulatory bleeding, amenorrhea, Cushing's syndrome, hydatidiform motes, Asherman's syndrome, premature menopause, precocious puberty, uterine polyps, dysfunctional uterine bleeding (e.g., due to aberrant hormonal signals), and neoplastic disorders, such as adenocarcinomas, keiomyosarcomas, and sarcomas. Additionally, the polypeptides, polynucleotides, or agonists or antagonists of the invention may be useful as a marker or detector of, as well as in the diagnosis, treatment, and/or prevention of congenital uterine abnormalities, such as bicornuate uterus, septate uterus, simple unicornuate uterus, unicomuate uterus with a noncavitary rudimentary horn, unicomuate uterus with a non-communicating cavitary rudimentary horn, unicornuate uterus with a communicating cavitary horn, arcuate uterus, uterine didelfus, and T-shaped uterus.

[0503] Ovarian diseases and/or disorders that may be diagnosed, treated, and/or prevented with the compositions of the invention include, but are not limited to, anovulation, polycystic ovary syndrome (Stein-Leventhal syndrome), ovarian cysts, ovarian hypofunction, ovarian insensitivity to gonadotropins, ovarian overproduction of androgens, right ovarian vein syndrome, amenorrhea, hirutism, and ovarian cancer (including, but not limited to, primary and secondary cancerous growth, Sertoli-Leydig tumors, endometriod carcinoma of the ovary, ovarian papillary serous adenocarcinoma, ovarian mucinous adenocarcinoma, and Ovarian Krukenberg tumors).

[0504] Cervical diseases and/or disorders that may be diagnosed, treated, and/or prevented with the compositions of the invention include, but are not limited to, cervicitis, chronic cervicitis, mucopurulent cervicitis, cervical dysplasia, cervical polyps, Nabothian cysts, cervical erosion, cervical incompetence, and cervical neoplasms (including, for example, cervical carcinoma, squamous metaplasia, squamous cell carcinoma, adenosquamous cell neoplasia, and columnar cell neoplasia).

[0505] Additionally, diseases and/or disorders of the reproductive system that may be diagnosed, treated, and/or prevented with the compositions of the invention include, but are not limited to, disorders and/or diseases of pregnancy, including miscarriage and stillbirth, such as early abortion, late abortion, spontaneous abortion, induced abortion, therapeutic abortion, threatened abortion, missed abortion, incomplete abortion, complete abortion, habitual abortion, missed abortion, and septic abortion; ectopic pregnancy, anemia, Rh incompatibility, vaginal bleeding during pregnancy, gestational diabetes, intrauterine growth retardation, polyhydramnios, HELLP syndrome, abruptio placentae, placenta previa, hyperemesis, preeclampsia, eclampsia, herpes gestationis, and urticaria of pregnancy. Additionally, the polynucleotides, polypeptides, and agonists or antagonists of the present invention may be used in the diagnosis, treatment, and/or prevention of diseases that can complicate pregnancy, including heart disease, heart failure, rheumatic heart disease, congenital heart disease, mitral valve prolapse, high blood pressure, anemia, kidney disease, infectious disease (e.g., rubella, cytomegalovirus, toxoplasmosis, infectious hepatitis, chlamydia, HIV, AIDS, and genital herpes), diabetes mellitus, Graves' disease, thyroiditis, hypothyroidism, Hashimoto's thyroiditis, chronic active hepatitis, cirrhosis of the liver, primary biliary cirrhosis, asthma, systemic lupus eryematosis, rheumatoid arthritis, myasthenia gravis, idiopathic thrombocytopenic purpura, appendicitis, ovarian cysts, gallbladder disorders, and obstruction of the intestine.

[0506] Complications associated with labor and parturition that may be diagnosed, treated, and/or prevented with the compositions of the invention include, but are not limited to, premature rupture of the membranes, pre-term labor, post-term pregnancy, postmaturity, labor that progresses too slowly, fetal distress (e.g., abnormal heart rate (fetal or maternal), breathing problems, and abnormal fetal position), shoulder dystocia, prolapsed umbilical cord, amniotic fluid embolism, and aberrant uterine bleeding.

[0507] Further, diseases and/or disorders of the postdelivery period, that may be diagnosed, treated, and/or prevented with the compositions of the invention, include, but are not limited to, endometritis, myometritis, parametritis, peritonitis, pelvic thrombophlebitis, pulmonary embolism, endotoxemia, pyelonephritis, saphenous thrombophlebitis, mastitis, cystitis, postpartum hemorrhage, and inverted uterus.

[0508] Other disorders and/or diseases of the female reproductive system that may be diagnosed, treated, and/or prevented by the polynucleotides, polypeptides, and agonists or antagonists of the present invention include, but are not limited to, Turner's syndrome, pseudohermaphroditism, premenstrual syndrome, pelvic inflammatory disease, pelvic congestion (vascular engorgement), frigidity, anorgasmia, dyspareunia, ruptured fallopian tube, and Mittelschmerz.

[0509] Immune Activity

[0510] Polynucleotides, polypeptides, antibodies, and/or agonists or antagonists of the present invention may be useful in treating, preventing, diagnosing and/or prognosing diseases, disorders, and/or conditions of the immune system, by, for example, activating or inhibiting the proliferation, differentiation, or mobilization (chemotaxis) of immune cells. Immune cells develop through a process called hematopoiesis, producing myeloid (platelets, red blood cells, neutrophils, and macrophages) and lymphoid (B and T lymphocytes) cells from pluripotent stem cells. The etiology of these immune diseases, disorders, and/or conditions may be genetic, somatic, such as cancer and some autoimmune diseases, acquired (e.g., by chemotherapy or toxins), or infectious. Moreover, polynucleotides, polypeptides, antibodies, and/or agonists or antagonists of the present invention can be used as a marker or detector of a particular immune system disease or disorder.

[0511] In another embodiment, a polypeptide of the invention, or polynucleotides, antibodies, agonists, or antagonists corresponding to that polypeptide, may be used to treat diseases and disorders of the immune system and/or to inhibit or enhance an immune response generated by cells associated with the tissue(s) in which the polypeptide of the invention is expressed, including one, two, three, four, five, or more tissues disclosed in Table 1A, column 7 (Tissue Distribution Library Code).

[0512] Polynucleotides, polypeptides, antibodies, and/or agonists or antagonists of the present invention may be useful in treating, preventing, diagnosing, and/or prognosing immunodeficiencies, including both congenital and acquired immunodeficiencies. Examples of B cell immunodeficiencies in which immunoglobulin levels B cell function and/or B cell numbers are decreased include: X-linked agammaglobulinemia (Bruton's disease), X-linked infantile agammaglobulinemia, X-linked immunodeficiency with hyper IgM, non X-linked immunodeficiency with hyper IgM, X-linked lymphoproliferative syndrome (XLP), agammaglobulinemia including congenital and acquired agammaglobulinemia, adult onset agammaglobulinemia, late-onset agammaglobulinemia, dysgammaglobulinemia, hypogammaglobulinemia, unspecified hypogammaglobulinemia, recessive agammaglobulinemia (Swiss type), Selective IgM deficiency, selective IgA deficiency, selective IgG subclass deficiencies, IgG subclass deficiency (with or without IgA deficiency), Ig deficiency with increased IgM, IgG and IgA deficiency with increased IgM, antibody deficiency with normal or elevated Igs, Ig heavy chain deletions, kappa chain deficiency, B cell lymphoproliferative disorder (BLPD), common variable immunodeficiency (CVID), common variable immunodeficiency (CVI) (acquired), and transient hypogammaglobulinemia of infancy.

[0513] In specific embodiments, ataxia-telangiectasia or conditions associated with ataxia-telangiectasia are treated, prevented, diagnosed, and/or prognosing using the polypeptides or polynucleotides of the invention, and/or agonists or antagonists thereof.

[0514] Examples of congenital immunodeficiencies in which T cell and/or B cell function and/or number is decreased include, but are not limited to: DiGeorge anomaly, severe combined immunodeficiencies (SCID) (including, but not limited to, X-linked SCID, autosomal recessive SCID, adenosine deaminase deficiency, purine nucleoside phosphorylase (PNP) deficiency, Class II MHC deficiency (Bare lymphocyte syndrome), Wiskott-Aldrich syndrome, and ataxia telangiectasia), thymic hypoplasia, third and fourth pharyngeal pouch syndrome, 22q11.2 deletion, chronic mucocutaneous candidiasis, natural killer cell deficiency (NK), idiopathic CD4+ T-lymphocytopenia, immunodeficiency with predominant T cell defect (unspecified), and unspecified immunodeficiency of cell mediated immunity.

[0515] In specific embodiments, DiGeorge anomaly or conditions associated with DiGeorge anomaly are treated, prevented, diagnosed, and/or prognosed using polypeptides or polynucleotides of the invention, or antagonists or agonists thereof.

[0516] Other immunodeficiencies that may be treated, prevented, diagnosed, and/or prognosed using polypeptides or polynucleotides of the invention, and/or agonists or antagonists thereof, include, but are not limited to, chronic granulomatous disease, Chediak-Higashi syndrome, myeloperoxidase deficiency, leukocyte glucose-6-phosphate dehydrogenase deficiency, X-linked lymphoproliferative syndrome (XLP), leukocyte adhesion deficiency, complement component deficiencies (including C1, C2, C3, C4, C5, C6, C7, C8 and/or C9 deficiencies), reticular dysgenesis, thymic alymphoplasia-aplasia, immunodeficiency with thymoma, severe congenital leukopenia, dysplasia with immunodeficiency, neonatal neutropenia, short limbed dwarfism, and Nezelof syndrome-combined immunodeficiency with Igs.

[0517] In a preferred embodiment, the immunodeficiencies and/or conditions associated with the immunodeficiencies recited above are treated, prevented, diagnosed and/or prognosed using polynucleotides, polypeptides, antibodies, and/or agonists or antagonists of the present invention.

[0518] In a preferred embodiment polynucleotides, polypeptides, antibodies, and/or agonists or antagonists of the present invention could be used as an agent to boost immunoresponsiveness among immunodeficient individuals. In specific embodiments, polynucleotides, polypeptides, antibodies, and/or agonists or antagonists of the present invention could be used as an agent to boost immunoresponsiveness among B cell and/or T cell immunodeficient individuals.

[0519] The polynucleotides, polypeptides, antibodies, and/or agonists or antagonists of the present invention may be useful in treating, preventing, diagnosing and/or prognosing autoimmune disorders. Many autoimmune disorders result from inappropriate recognition of self as foreign material by immune cells. This inappropriate recognition results in an immune response leading to the destruction of the host tissue. Therefore, the administration of polynucleotides and polypeptides of the invention that can inhibit an immune response, particularly the proliferation, differentiation, or chemotaxis of T-cells, may be an effective therapy in preventing autoimmune disorders.

[0520] Autoimmune diseases or disorders that may be treated, prevented, diagnosed and/or prognosed by polynucleotides, polypeptides, antibodies, and/or agonists or antagonists of the present invention include, but are not limited to, one or more of the following: systemic lupus erythematosus, rheumatoid arthritis, ankylosing spondylitis, multiple sclerosis, autoimmune thyroiditis, Hashimoto's thyroiditis, autoimmune hemolytic anemia, hemolytic anemia, thrombocytopenia, autoimmune thrombocytopenia purpura, autoimmune neonatal thrombocytopenia, idiopathic thrombocytopenia purpura, purpura (e.g., Henloch-Scoenlein purpura), autoimmunocytopenia, Goodpasture's syndrome, Pemphigus vulgaris, myasthenia gravis, Grave's disease (hyperthyroidism), and insulin-resistant diabetes mellitus.

[0521] Additional disorders that are likely to have an autoimmune component that may be treated, prevented, and/or diagnosed with the compositions of the invention include, but are not limited to, type II collagen-induced arthritis, antiphospholipid syndrome, dermatitis, allergic encephalomyelitis, myocarditis, relapsing polychondritis, rheumatic heart disease, neuritis, uveitis ophthalmia, polyendocrinopathies, Reiter's Disease, Stiff-Man Syndrome, autoimmune pulmonary inflammation, autism, Guillain-Barre Syndrome, insulin dependent diabetes mellitus, and autoimmune inflammatory eye disorders.

[0522] Additional disorders that are likely to have an autoimmune component that may be treated, prevented, diagnosed and/or prognosed with the compositions of the invention include, but are not limited to, scleroderma with anti-collagen antibodies (often characterized, e.g., by nucleolar and other nuclear antibodies), mixed connective tissue disease (often characterized, e.g., by antibodies to extractable nuclear antigens (e.g., ribonucleoprotein)), polymyositis (often characterized, e.g., by nonhistone ANA), pernicious anemia (often characterized, e.g., by antiparietal cell, microsomes, and intrinsic factor antibodies), idiopathic Addison's disease (often characterized, e.g., by humoral and cell-mediated adrenal cytotoxicity, infertility (often characterized, e.g., by antispermatozoal antibodies), glomerulonephritis (often characterized, e.g., by glomerular basement membrane antibodies or immune complexes), bullous pemphigoid (often characterized, e.g., by IgG and complement in basement membrane), Sjogren's syndrome (often characterized, e.g., by multiple tissue antibodies, and/or a specific nonhistone ANA (SS-B)), diabetes mellitus (often characterized, e.g., by cell-mediated and humoral islet cell antibodies), and adrenergic drug resistance (including adrenergic drug resistance with asthma or cystic fibrosis) (often characterized, e.g., by beta-adrenergic receptor antibodies).

[0523] Additional disorders that may have an autoimmune component that may be treated, prevented, diagnosed and/or prognosed with the compositions of the invention include, but are not limited to, chronic active hepatitis (often characterized, e.g., by smooth muscle antibodies), primary biliary cirrhosis (often characterized, e.g., by mitochondria antibodies), other endocrine gland failure (often characterized, e.g., by specific tissue antibodies in some cases), vitiligo (often characterized, e.g., by melanocyte antibodies), vasculitis (often characterized, e.g., by Ig and complement in vessel walls and/or low serum complement), post-MI (often characterized, e.g., by myocardial antibodies), cardiotomy syndrome (often characterized, e.g., by myocardial antibodies), urticaria (often characterized, e.g., by IgG and IgM antibodies to IgE), atopic dermatitis (often characterized, e.g., by IgG and IgM antibodies to IgE), asthma (often characterized, e.g., by IgG and IgM antibodies to IgE), and many other inflammatory, granulomatous, degenerative, and atrophic disorders.

[0524] In a preferred embodiment, the autoimmune diseases and disorders and/or conditions associated with the diseases and disorders recited above are treated, prevented, diagnosed and/or prognosed using for example, antagonists or agonists, polypeptides or polynucleotides, or antibodies of the present invention. In a specific preferred embodiment, rheumatoid arthritis is treated, prevented, and/or diagnosed using polynucleotides, polypeptides, antibodies, and/or agonists or antagonists of the present invention.

[0525] In another specific preferred embodiment, systemic lupus erythematosus is treated, prevented, and/or diagnosed using polynucleotides, polypeptides, antibodies, and/or agonists or antagonists of the present invention. In another specific preferred embodiment, idiopathic thrombocytopenia purpura is treated, prevented, and/or diagnosed using polynucleotides, polypeptides, antibodies, and/or agonists or antagonists of the present invention.

[0526] In another specific preferred embodiment IgA nephropathy is treated, prevented, and/or diagnosed using polynucleotides, polypeptides, antibodies, and/or agonists or antagonists of the present invention.

[0527] In a preferred embodiment, the autoimmune diseases and disorders and/or conditions associated with the diseases and disorders recited above are treated, prevented, diagnosed and/or prognosed using polynucleotides, polypeptides, antibodies, and/or agonists or antagonists of the present invention.

[0528] In preferred embodiments, polypeptides, antibodies, polynucleotides and/or agonists or antagonists of the present invention are used as a immunosuppressive agent(s).

[0529] Polynucleotides, polypeptides, antibodies, and/or agonists or antagonists of the present invention may be useful in treating, preventing, prognosing, and/or diagnosing diseases, disorders, and/or conditions of hematopoietic cells. Polynucleotides, polypeptides, antibodies, and/or agonists or antagonists of the present invention could be used to increase differentiation and proliferation of hematopoietic cells, including the pluripotent stem cells, in an effort to treat or prevent those diseases, disorders, and/or conditions associated with a decrease in certain (or many) types hematopoietic cells, including but not limited to, leukopenia, neutropenia, anemia, and thrombocytopenia. Alternatively, Polynucleotides, polypeptides, antibodies, and/or agonists or antagonists of the present invention could be used to increase differentiation and proliferation of hematopoietic cells, including the pluripotent stem cells, in an effort to treat or prevent those diseases, disorders, and/or conditions associated with an increase in certain (or many) types of hematopoietic cells, including but not limited to, histiocytosis.

[0530] Allergic reactions and conditions, such as asthma (particularly allergic asthma) or other respiratory problems, may also be treated, prevented, diagnosed and/or prognosed using polypeptides, antibodies, or polynucleotides of the invention, and/or agonists or antagonists thereof. Moreover, these molecules can be used to treat, prevent, prognose, and/or diagnose anaphylaxis, hypersensitivity to an antigenic molecule, or blood group incompatibility.

[0531] Additionally, polypeptides or polynucleotides of the invention, and/or agonists or antagonists thereof, may be used to treat, prevent, diagnose and/or prognose IgE-mediated allergic reactions. Such allergic reactions include, but are not limited to, asthma, rhinitis, and eczema. In specific embodiments, polynucleotides, polypeptides, antibodies, and/or agonists or antagonists of the present invention may be used to modulate IgE concentrations in vitro or in vivo.

[0532] Moreover, polynucleotides, polypeptides, antibodies, and/or agonists or antagonists of the present invention have uses in the diagnosis, prognosis, prevention, and/or treatment of inflammatory conditions. For example, since polypeptides, antibodies, or polynucleotides of the invention, and/or agonists or antagonists of the invention may inhibit the activation, proliferation and/or differentiation of cells involved in an inflammatory response, these molecules can be used to prevent and/or treat chronic and acute inflammatory conditions. Such inflammatory conditions include, but are not limited to, for example, inflammation associated with infection (e.g., septic shock, sepsis, or systemic inflammatory response syndrome), ischemia-reperfusion injury, endotoxin lethality, complement-mediated hyperacute rejection, nephritis, cytokine or chemokine induced lung injury, inflammatory bowel disease, Crohn's disease, over production of cytokines (e.g., TNF or IL-1.), respiratory disorders (e.g., asthma and allergy); gastrointestinal disorders (e.g., inflammatory bowel disease); cancers (e.g., gastric, ovarian, lung, bladder, liver, and breast); CNS disorders (e.g., multiple sclerosis; ischemic brain injury and/or stroke, traumatic brain injury, neurodegenerative disorders (e.g., Parkinson's disease and Alzheimer's disease); AIDS-related dementia; and prion disease); cardiovascular disorders (e.g., atherosclerosis, myocarditis, cardiovascular disease, and cardiopulmonary bypass complications); as well as many additional diseases, conditions, and disorders that are characterized by inflammation (e.g., hepatitis, rheumatoid arthritis, gout, trauma, pancreatitis, sarcoidosis, dermatitis, renal ischemia-reperfusion injury, Grave's disease, systemic lupus erythematosus, diabetes mellitus, and allogenic transplant rejection).

[0533] Because inflammation is a fundamental defense mechanism, inflammatory disorders can effect virtually any tissue of the body. Accordingly, polynucleotides, polypeptides, and antibodies of the invention, as well as agonists or antagonists thereof, have uses in the treatment of tissue-specific inflammatory disorders, including, but not limited to, adrenalitis, alveolitis, angiocholecystitis, appendicitis, balanitis, blepharitis, bronchitis, bursitis, carditis, cellulitis, cervicitis, cholecystitis, chorditis, cochlitis, colitis, conjunctivitis, cystitis, dermatitis, diverticulitis, encephalitis, endocarditis, esophagitis, eustachitis, fibrositis, folliculitis, gastritis, gastroenteritis, gingivitis, glossitis, hepatosplenitis, keratitis, labyrinthitis, laryngitis, lymphangitis, mastitis, media otitis, meningitis, metritis, mucitis, myocarditis, myosititis, myringitis, nephritis, neuritis, orchitis, osteochondritis, otitis, pericarditis, peritendonitis, peritonitis, pharyngitis, phlebitis, poliomyelitis, prostatitis, pulpitis, retinitis, rhinitis, salpingitis, scleritis, sclerochoroiditis, scrotitis, sinusitis, spondylitis, steatitis, stomatitis, synovitis, syringitis, tendonitis, tonsillitis, urethritis, and vaginitis.

[0534] In specific embodiments, polypeptides, antibodies, or polynucleotides of the invention, and/or agonists or antagonists thereof, are useful to diagnose, prognose, prevent, and/or treat organ transplant rejections and graft-versus-host disease. Organ rejection occurs by host immune cell destruction of the transplanted tissue through an immune response. Similarly, an immune response is also involved in GVHD, but, in this case, the foreign transplanted immune cells destroy the host tissues. Polypeptides, antibodies, or polynucleotides of the invention, and/or agonists or antagonists thereof, that inhibit an immune response, particularly the activation, proliferation, differentiation, or chemotaxis of T-cells, may be an effective therapy in preventing organ rejection or GVHD. In specific embodiments, polypeptides, antibodies, or polynucleotides of the invention, and/or agonists or antagonists thereof, that inhibit an immune response, particularly the activation, proliferation, differentiation, or chemotaxis of T-cells, may be an effective therapy in preventing experimental allergic and hyperacute xenograft rejection.

[0535] In other embodiments, polypeptides, antibodies, or polynucleotides of the invention, and/or agonists or antagonists thereof, are useful to diagnose, prognose, prevent, and/or treat immune complex diseases, including, but not limited to, serum sickness, post streptococcal glomerulonephritis, polyarteritis nodosa, and immune complex-induced vasculitis.

[0536] Polypeptides, antibodies, polynucleotides and/or agonists or antagonists of the invention can be used to treat, detect, and/or prevent infectious agents. For example, by increasing the immune response, particularly increasing the proliferation activation and/or differentiation of B and/or T cells, infectious diseases may be treated, detected, and/or prevented. The immune response may be increased by either enhancing an existing immune response, or by initiating a new immune response. Alternatively, polynucleotides, polypeptides, antibodies, and/or agonists or antagonists of the present invention may also directly inhibit the infectious agent (refer to section of application listing infectious agents, etc), without necessarily eliciting an immune response.

[0537] In another embodiment, polypeptides, antibodies, polynucleotides and/or agonists or antagonists of the present invention are used as a vaccine adjuvant that enhances immune responsiveness to an antigen. In a specific embodiment, polypeptides, antibodies, polynucleotides and/or agonists or antagonists of the present invention are used as an adjuvant to enhance tumor-specific immune responses.

[0538] In another specific embodiment, polypeptides, antibodies, polynucleotides and/or agonists or antagonists of the present invention are used as an adjuvant to enhance anti-viral immune responses. Anti-viral immune responses that may be enhanced using the compositions of the invention as an adjuvant, include virus and virus associated diseases or symptoms described herein or otherwise known in the art. In specific embodiments, the compositions of the invention are used as an adjuvant to enhance an immune response to a virus, disease, or symptom selected from the group consisting of: AIDS, meningitis, Dengue, EBV, and hepatitis (e.g., hepatitis B). In another specific embodiment, the compositions of the invention are used as an adjuvant to enhance an immune response to a virus, disease, or symptom selected from the group consisting of: HIV/AIDS, respiratory syncytial virus, Dengue, rotavirus, Japanese B encephalitis, influenza A and B, parainfluenza, measles, cytomegalovirus, rabies, Junin, Chikungunya, Rift Valley Fever, herpes simplex, and yellow fever.

[0539] In another specific embodiment, polypeptides, antibodies, polynucleotides and/or agonists or antagonists of the present invention are used as an adjuvant to enhance anti-bacterial or anti-fungal immune responses. Anti-bacterial or anti-fungal immune responses that may be enhanced using the compositions of the invention as an adjuvant, include bacteria or fungus and bacteria or fungus associated diseases or symptoms described herein or otherwise known in the art. In specific embodiments, the compositions of the invention are used as an adjuvant to enhance an immune response to a bacteria or fungus, disease, or symptom selected from the group consisting of: tetanus, Diphtheria, botulism, and meningitis type B.

[0540] In another specific embodiment, the compositions of the invention are used as an adjuvant to enhance an immune response to a bacteria or fungus, disease, or symptom selected from the group consisting of: Vibrio cholerae, Mycobacterium leprae, Salmonella typhi, Salmonella paratyphi, Meisseria meningitidis, Streptococcus pneumoniae, Group B streptococcus, Shigella spp., Enterotoxigenic Escherichia coli, Enterohemorrhagic E. coli, and Borrelia burgdorferi.

[0541] In another specific embodiment, polypeptides, antibodies, polynucleotides and/or agonists or antagonists of the present invention are used as an adjuvant to enhance anti-parasitic immune responses. Anti-parasitic immune responses that may be enhanced using the compositions of the invention as an adjuvant, include parasite and parasite associated diseases or symptoms described herein or otherwise known in the art. In specific embodiments, the compositions of the invention are used as an adjuvant to enhance an immune response to a parasite. In another specific embodiment, the compositions of the invention are used as an adjuvant to enhance an immune response to Plasmodium (malaria) or Leishmania.

[0542] In another specific embodiment, polypeptides, antibodies, polynucleotides and/or agonists or antagonists of the present invention may also be employed to treat infectious diseases including silicosis, sarcoidosis, and idiopathic pulmonary fibrosis; for example, by preventing the recruitment and activation of mononuclear phagocytes.

[0543] In another specific embodiment, polypeptides, antibodies, polynucleotides and/or agonists or antagonists of the present invention are used as an antigen for the generation of antibodies to inhibit or enhance immune mediated responses against polypeptides of the invention.

[0544] In one embodiment, polypeptides, antibodies, polynucleotides and/or agonists or antagonists of the present invention are administered to an animal (e.g., mouse, rat, rabbit, hamster, guinea pig, pigs, micro-pig, chicken, camel, goat, horse, cow, sheep, dog, cat, non-human primate, and human, most preferably human) to boost the immune system to produce increased quantities of one or more antibodies (e.g., IgG, IgA, IgM, and IgE), to induce higher affinity antibody production and immunoglobulin class switching (e.g., IgG, IgA, IgM, and IgE), and/or to increase an immune response.

[0545] In another specific embodiment, polypeptides, antibodies, polynucleotides and/or agonists or antagonists of the present invention are used as a stimulator of B cell responsiveness to pathogens.

[0546] In another specific embodiment, polypeptides, antibodies, polynucleotides and/or agonists or antagonists of the present invention are used as an activator of T cells.

[0547] In another specific embodiment, polypeptides, antibodies, polynucleotides and/or agonists or antagonists of the present invention are used as an agent that elevates the immune status of an individual prior to their receipt of immunosuppressive therapies.

[0548] In another specific embodiment, polypeptides, antibodies, polynucleotides and/or agonists or antagonists of the present invention are used as an agent to induce higher affinity antibodies.

[0549] In another specific embodiment, polypeptides, antibodies, polynucleotides and/or agonists or antagonists of the present invention are used as an agent to increase serum immunoglobulin concentrations.

[0550] In another specific embodiment, polypeptides, antibodies, polynucleotides and/or agonists or antagonists of the present invention are used as an agent to accelerate recovery of immunocompromised individuals.

[0551] In another specific embodiment, polypeptides, antibodies, polynucleotides and/or agonists or antagonists of the present invention are used as an agent to boost immunoresponsiveness among aged populations and/or neonates.

[0552] In another specific embodiment, polypeptides, antibodies, polynucleotides and/or agonists or antagonists of the present invention are used as an immune system enhancer prior to, during, or after bone marrow transplant and/or other transplants (e.g., allogeneic or xenogeneic organ transplantation). With respect to transplantation, compositions of the invention may be administered prior to, concomitant with, and/or after transplantation. In a specific embodiment, compositions of the invention are administered after transplantation, prior to the beginning of recovery of T-cell populations. In another specific embodiment, compositions of the invention are first administered after transplantation after the beginning of recovery of T cell populations, but prior to full recovery of B cell populations.

[0553] In another specific embodiment, polypeptides, antibodies, polynucleotides and/or agonists or antagonists of the present invention are used as an agent to boost immunoresponsiveness among individuals having an acquired loss of B cell function. Conditions resulting in an acquired loss of B cell function that may be ameliorated or treated by administering the polypeptides, antibodies, polynucleotides and/or agonists or antagonists thereof, include, but are not limited to, HIV Infection, AIDS, bone marrow transplant, and B cell chronic lymphocytic leukemia (CLL).

[0554] In another specific embodiment, polypeptides, antibodies, polynucleotides and/or agonists or antagonists of the present invention are used as an agent to boost immunoresponsiveness among individuals having a temporary immune deficiency. Conditions resulting in a temporary immune deficiency that may be ameliorated or treated by administering the polypeptides, antibodies, polynucleotides and/or agonists or antagonists thereof, include, but are not limited to, recovery from viral infections (e.g., influenza), conditions associated with malnutrition, recovery from infectious mononucleosis, or conditions associated with stress, recovery from measles, recovery from blood transfusion, and recovery from surgery.

[0555] In another specific embodiment, polypeptides, antibodies, polynucleotides and/or agonists or antagonists of the present invention are used as a regulator of antigen presentation by monocytes, dendritic cells, and/or B-cells. In one embodiment, polynucleotides, polypeptides, antibodies, and/or agonists or antagonists of the present invention enhance antigen presentation or antagonizes antigen presentation in vitro or in vivo. Moreover, in related embodiments, said enhancement or antagonism of antigen presentation may be useful as an anti-tumor treatment or to modulate the immune system.

[0556] In another specific embodiment, polypeptides, antibodies, polynucleotides and/or agonists or antagonists of the present invention are used as an agent to direct an individual's immune system towards development of a humoral response (i.e. TH2) as opposed to a TH1 cellular response.

[0557] In another specific embodiment, polypeptides, antibodies, polynucleotides and/or agonists or antagonists of the present invention are used as a means to induce tumor proliferation and thus make it more susceptible to anti-neoplastic agents. For example, multiple myeloma is a slowly dividing disease and is thus refractory to virtually all anti-neoplastic regimens. If these cells were forced to proliferate more rapidly their susceptibility profile would likely change.

[0558] In another specific embodiment, polypeptides, antibodies, polynucleotides and/or agonists or antagonists of the present invention are used as a stimulator of B cell production in pathologies such as AIDS, chronic lymphocyte disorder and/or Common Variable Immunodificiency.

[0559] In another specific embodiment, polypeptides, antibodies, polynucleotides and/or agonists or antagonists of the present invention are used as a therapy for generation and/or regeneration of lymphoid tissues following surgery, trauma or genetic defect. In another specific embodiment, polypeptides, antibodies, polynucleotides and/or agonists or antagonists of the present invention are used in the pretreatment of bone marrow samples prior to transplant.

[0560] In another specific embodiment, polypeptides, antibodies, polynucleotides and/or agonists or antagonists of the present invention are used as a gene-based therapy for genetically inherited disorders resulting in immuno-incompetence/immunodeficiency such as observed among SCID patients.

[0561] In another specific embodiment, polypeptides, antibodies, polynucleotides and/or agonists or antagonists of the present invention are used as a means of activating monocytes/macrophages to defend against parasitic diseases that effect monocytes such as Leishmania.

[0562] In another specific embodiment, polypeptides, antibodies, polynucleotides and/or agonists or antagonists of the present invention are used as a means of regulating secreted cytokines that are elicited by polypeptides of the invention.

[0563] In another embodiment, polypeptides, antibodies, polynucleotides and/or agonists or antagonists of the present invention are used in one or more of the applications decribed herein, as they may apply to veterinary medicine.

[0564] In another specific embodiment, polypeptides, antibodies, polynucleotides and/or agonists or antagonists of the present invention are used as a means of blocking various aspects of immune responses to foreign agents or self. Examples of diseases or conditions in which blocking of certain aspects of immune responses may be desired include autoimmune disorders such as lupus, and arthritis, as well as immunoresponsiveness to skin allergies, inflammation, bowel disease, injury and diseases/disorders associated with pathogens.

[0565] In another specific embodiment, polypeptides, antibodies, polynucleotides and/or agonists or antagonists of the present invention are used as a therapy for preventing the B cell proliferation and Ig secretion associated with autoimmune diseases such as idiopathic thrombocytopenic purpura, systemic lupus erythematosus and multiple sclerosis.

[0566] In another specific embodiment, polypeptides, antibodies, polynucleotides and/or agonists or antagonists of the present invention are used as a inhibitor of B and/or T cell migration in endothelial cells. This activity disrupts tissue architecture or cognate responses and is useful, for example in disrupting immune responses, and blocking sepsis.

[0567] In another specific embodiment, polypeptides, antibodies, polynucleotides and/or agonists or antagonists of the present invention are used as a therapy for chronic hypergammaglobulinemia evident in such diseases as monoclonal gammopathy of undetermined significance (MGUS), Waldenstrom's disease, related idiopathic monoclonal gammopathies, and plasmacytomas.

[0568] In another specific embodiment, polypeptides, antibodies, polynucleotides and/or agonists or antagonists of the present invention may be employed for instance to inhibit polypeptide chemotaxis and activation of macrophages and their precursors, and of neutrophils, basophils, B lymphocytes and some T-cell subsets, e.g., activated and CD8 cytotoxic T cells and natural killer cells, in certain autoimmune and chronic inflammatory and infective diseases. Examples of autoimmune diseases are described herein and include multiple sclerosis, and insulin-dependent diabetes.

[0569] The polypeptides, antibodies, polynucleotides and/or agonists or antagonists of the present invention may also be employed to treat idiopathic hyper-eosinophilic syndrome by, for example, preventing eosinophil production and migration.

[0570] In another specific embodiment, polypeptides, antibodies, polynucleotides and/or agonists or antagonists of the present invention are used to enhance or inhibit complement mediated cell lysis.

[0571] In another specific embodiment, polypeptides, antibodies, polynucleotides and/or agonists or antagonists of the present invention are used to enhance or inhibit antibody dependent cellular cytotoxicity.

[0572] In another specific embodiment, polypeptides, antibodies, polynucleotides and/or agonists or antagonists of the present invention may also be employed for treating atherosclerosis, for example, by preventing monocyte infiltration in the artery wall.

[0573] In another specific embodiment, polypeptides, antibodies, polynucleotides and/or agonists or antagonists of the present invention may be employed to treat adult respiratory distress syndrome (ARDS).

[0574] In another specific embodiment, polypeptides, antibodies, polynucleotides and/or agonists or antagonists of the present invention may be useful for stimulating wound and tissue repair, stimulating angiogenesis, and/or stimulating the repair of vascular or lymphatic diseases or disorders. Additionally, agonists and antagonists of the invention may be used to stimulate the regeneration of mucosal surfaces.

[0575] In a specific embodiment, polynucleotides or polypeptides, and/or agonists thereof are used to diagnose, prognose, treat, and/or prevent a disorder characterized by primary or acquired immunodeficiency, deficient serum immunoglobulin production, recurrent infections, and/or immune system dysfunction. Moreover, polynucleotides or polypeptides, and/or agonists thereof may be used to treat or prevent infections of the joints, bones, skin, and/or parotid glands, blood-borne infections (e.g., sepsis, meningitis, septic arthritis, and/or osteomyelitis), autoimmune diseases (e.g., those disclosed herein), inflammatory disorders, and malignancies, and/or any disease or disorder or condition associated with these infections, diseases, disorders and/or malignancies) including, but not limited to, CVID, other primary immune deficiencies, HIV disease, CLL, recurrent bronchitis, sinusitis, otitis media, conjunctivitis, pneumonia, hepatitis, meningitis, herpes zoster (e.g., severe herpes zoster), and/or pneumocystis carnii. Other diseases and disorders that may be prevented, diagnosed, prognosed, and/or treated with polynucleotides or polypeptides, and/or agonists of the present invention include, but are not limited to, HIV infection, HTLV-BLV infection, lymphopenia, phagocyte bactericidal dysfunction anemia, thrombocytopenia, and hemoglobinuria.

[0576] In another embodiment, polynucleotides, polypeptides, antibodies, and/or agonists or antagonists of the present invention are used to treat, and/or diagnose an individual having common variable immunodeficiency disease (“CVID”; also known as “acquired agammaglobulinemia” and “acquired hypogammaglobulinemia”) or a subset of this disease.

[0577] In a specific embodiment, polynucleotides, polypeptides, antibodies, and/or agonists or antagonists of the present invention may be used to diagnose, prognose, prevent, and/or treat cancers or neoplasms including immune cell or immune tissue-related cancers or neoplasms. Examples of cancers or neoplasms that may be prevented, diagnosed, or treated by polynucleotides, polypeptides, antibodies, and/or agonists or antagonists of the present invention include, but are not limited to, acute myelogenous leukemia, chronic myelogenous leukemia, Hodgkin's disease, non-Hodgkin's lymphoma, acute lymphocytic anemia (ALL) Chronic lymphocyte leukemia, plasmacytomas, multiple myeloma, Burkitt's lymphoma, EBV-transformed diseases, and/or diseases and disorders described in the section entitled “Hyperproliferative Disorders” elsewhere herein.

[0578] In another specific embodiment, polypeptides, antibodies, polynucleotides and/or agonists or antagonists of the present invention are used as a therapy for decreasing cellular proliferation of Large B-cell Lymphomas.

[0579] In another specific embodiment, polypeptides, antibodies, polynucleotides and/or agonists or antagonists of the present invention are used as a means of decreasing the involvement of B cells and Ig associated with Chronic Myelogenous Leukemia.

[0580] In specific embodiments, the compositions of the invention are used as an agent to boost immunoresponsiveness among B cell immunodeficient individuals, such as, for example, an individual who has undergone a partial or complete splenectomy.

[0581] Antagonists of the invention include, for example, binding- and/or inhibitory antibodies, antisense nucleic acids, ribozymes or soluble forms of the polypeptides of the present invention (e.g., Fc fusion protein; see, e.g., Example 9). Agonists of the invention include, for example, binding or stimulatory antibodies, and soluble forms of the polypeptides (e.g., Fc fusion proteins; see, e.g., Example 9). Polypeptides, antibodies, polynucleotides and/or agonists or antagonists of the present invention may be employed in a composition with a pharmaceutically acceptable carrier, e.g., as described herein.

[0582] In another embodiment, polypeptides, antibodies, polynucleotides and/or agonists or antagonists of the present invention are administered to an animal (including, but not limited to, those listed above, and also including transgenic animals) incapable of producing functional endogenous antibody molecules or having an otherwise compromised endogenous immune system, but which is capable of producing human immunoglobulin molecules by means of a reconstituted or partially reconstituted immune system from another animal (see, e.g., published PCT Application Nos. WO98/24893, WO/9634096, WO/9633735, and WO/9110741). Administration of polypeptides, antibodies, polynucleotides and/or agonists or antagonists of the present invention to such animals is useful for the generation of monoclonal antibodies against the polypeptides, antibodies, polynucleotides and/or agonists or antagonists of the present invention.

[0583] Blood-Related Disorders

[0584] The polynucleotides, polypeptides, antibodies, and/or agonists or antagonists of the present invention may be used to modulate hemostatic (the stopping of bleeding) or thrombolytic (clot dissolving) activity. For example, by increasing hemostatic or thrombolytic activity, polynucleotides or polypeptides, and/or agonists or antagonists of the present invention could be used to treat or prevent blood coagulation diseases, disorders, and/or conditions (e.g., afibrinogenemia, factor deficiencies, hemophilia), blood platelet diseases, disorders, and/or conditions (e.g., thrombocytopenia), or wounds resulting from trauma, surgery, or other causes. Alternatively, polynucleotides, polypeptides, antibodies, and/or agonists or antagonists of the present invention that can decrease hemostatic or thrombolytic activity could be used to inhibit or dissolve clotting. These molecules could be important in the treatment or prevention of heart attacks (infarction), strokes, or scarring.

[0585] In specific embodiments, the polynucleotides, polypeptides, antibodies, and/or agonists or antagonists of the present invention may be used to prevent, diagnose, prognose, and/or treat thrombosis, arterial thrombosis, venous thrombosis, thromboembolism, pulmonary embolism, atherosclerosis, myocardial infarction, transient ischemic attack, unstable angina. In specific embodiments, the polynucleotides, polypeptides, antibodies, and/or agonists or antagonists of the present invention may be used for the prevention of occulsion of saphenous grafts, for reducing the risk of periprocedural thrombosis as might accompany angioplasty procedures, for reducing the risk of stroke in patients with atrial fibrillation including nonrheumatic atrial fibrillation, for reducing the risk of embolism associated with mechanical heart valves and or mitral valves disease. Other uses for the polynucleotides, polypeptides, antibodies, and/or agonists or antagonists of the present invention, include, but are not limited to, the prevention of occlusions in extrcorporeal devices (e.g., intravascular canulas, vascular access shunts in hemodialysis patients, hemodialysis machines, and cardiopulmonary bypass machines).

[0586] In another embodiment, a polypeptide of the invention, or polynucleotides, antibodies, agonists, or antagonists corresponding to that polypeptide, may be used to prevent, diagnose, prognose, and/or treat diseases and disorders of the blood and/or blood forming organs associated with the tissue(s) in which the polypeptide of the invention is expressed, including one, two, three, four, five, or more tissues disclosed in Table 1A, column 7 (Tissue Distribution Library Code).

[0587] The polynucleotides, polypeptides, antibodies, and/or agonists or antagonists of the present invention may be used to modulate hematopoietic activity (the formation of blood cells). For example, the polynucleotides, polypeptides, antibodies, and/or agonists or antagonists of the present invention may be used to increase the quantity of all or subsets of blood cells, such as, for example, erythrocytes, lymphocytes (B or T cells), myeloid cells (e.g., basophils, eosinophils, neutrophils, mast cells, macrophages) and platelets. The ability to decrease the quantity of blood cells or subsets of blood cells may be useful in the prevention, detection, diagnosis and/or treatment of anemias and leukopenias described below. Alternatively, the polynucleotides, polypeptides, antibodies, and/or agonists or antagonists of the present invention may be used to decrease the quantity of all or subsets of blood cells, such as, for example, erythrocytes, lymphocytes (B or T cells), myeloid cells (e.g., basophils, eosinophils, neutrophils, mast cells, macrophages) and platelets. The ability to decrease the quantity of blood cells or subsets of blood cells may be useful in the prevention, detection, diagnosis and/or treatment of leukocytoses, such as, for example eosinophilia.

[0588] The polynucleotides, polypeptides, antibodies, and/or agonists or antagonists of the present invention may be used to prevent, treat, or diagnose blood dyscrasia.

[0589] Anemias are conditions in which the number of red blood cells or amount of hemoglobin (the protein that carries oxygen) in them is below normal. Anemia may be caused by excessive bleeding, decreased red blood cell production, or increased red blood cell destruction (hemolysis). The polynucleotides, polypeptides, antibodies, and/or agonists or antagonists of the present invention may be useful in treating, preventing, and/or diagnosing anemias. Anemias that may be treated prevented or diagnosed by the polynucleotides, polypeptides, antibodies, and/or agonists or antagonists of the present invention include iron deficiency anemia, hypochromic anemia, microcytic anemia, chlorosis, hereditary siderob;astic anemia, idiopathic acquired sideroblastic anemia, red cell aplasia, megaloblastic anemia (e.g., pernicious anemia, (vitamin B 12 deficiency) and folic acid deficiency anemia), aplastic anemia, hemolytic anemias (e.g., autoimmune helolytic anemia, microangiopathic hemolytic anemia, and paroxysmal nocturnal hemoglobinuria). The polynucleotides, polypeptides, antibodies, and/or agonists or antagonists of the present invention may be useful in treating, preventing, and/or diagnosing anemias associated with diseases including but not limited to, anemias associated with systemic lupus erythematosus, cancers, lymphomas, chronic renal disease, and enlarged spleens. The polynucleotides, polypeptides, antibodies, and/or agonists or antagonists of the present invention may be useful in treating, preventing, and/or diagnosing anemias arising from drug treatments such as anemias associated with methyldopa, dapsone, and/or sulfadrugs. Additionally, rhe polynucleotides, polypeptides, antibodies, and/or agonists or antagonists of the present invention may be useful in treating, preventing, and/or diagnosing anemias associated with abnormal red blood cell architecture including but not limited to, hereditary spherocytosis, hereditary elliptocytosis, glucose-6-phosphate dehydrogenase deficiency, and sickle cell anemia.

[0590] The polynucleotides, polypeptides, antibodies, and/or agonists or antagonists of the present invention may be useful in treating, preventing, and/or diagnosing hemoglobin abnormalities, (e.g., those associated with sickle cell anemia, hemoglobin C disease, hemoglobin S-C disease, and hemoglobin E disease). Additionally, the polynucleotides, polypeptides, antibodies, and/or agonists or antagonists of the present invention may be useful in diagnosing, prognosing, preventing, and/or treating thalassemias, including, but not limited to major and minor forms of alpha-thalassemia and beta-thalassemia.

[0591] In another embodiment, the polynucleotides, polypeptides, antibodies, and/or agonists or antagonists of the present invention may be useful in diagnosing, prognosing, preventing, and/or treating bleeding disorders including, but not limited to, thrombocytopenia (e.g., idiopathic thrombocytopenic purpura, and thrombotic thrombocytopenic purpura), Von Willebrand's disease, hereditary platelet disorders (e.g., storage pool disease such as Chediak-Higashi and Hermansky-Pudlak syndromes, thromboxane A2 dysfunction, thromboasthenia, and Bernard-Soulier syndrome), hemolytic-uremic syndrome, hemophelias such as hemophelia A or Factor VII deficiency and Christmas disease or Factor IX deficiency, Hereditary Hemorhhagic Telangiectsia, also known as Rendu-Osler-Weber syndrome, allergic purpura (Henoch Schonlein purpura) and disseminated intravascular coagulation.

[0592] The effect of the polynucleotides, polypeptides, antibodies, and/or agonists or antagonists of the present invention on the clotting time of blood may be monitored using any of the clotting tests known in the art including, but not limited to, whole blood partial thromboplastin time (PTT), the activated partial thromboplastin time (aPTT), the activated clotting time (ACT), the recalcified activated clotting time, or the Lee-White Clotting time.

[0593] Several diseases and a variety of drugs can cause platelet dysfunction. Thus, in a specific embodiment, the polynucleotides, polypeptides, antibodies, and/or agonists or antagonists of the present invention may be useful in diagnosing, prognosing, preventing, and/or treating acquired platelet dysfunction such as platelet dysfunction accompanying kidney failure, leukemia, multiple myeloma, cirrhosis of the liver, and systemic lupus erythematosus as well as platelet dysfunction associated with drug treatments, including treatment with aspirin, ticlopidine, nonsteroidal anti-inflammatory drugs (used for arthritis, pain, and sprains), and penicillin in high doses.

[0594] In another embodiment, the polynucleotides, polypeptides, antibodies, and/or agonists or antagonists of the present invention may be useful in diagnosing, prognosing, preventing, and/or treating diseases and disorders characterized by or associated with increased or decreased numbers of white blood cells. Leukopenia occurs when the number of white blood cells decreases below normal. Leukopenias include, but are not limited to, neutropenia and lymphocytopenia. An increase in the number of white blood cells compared to normal is known as leukocytosis. The body generates increased numbers of white blood cells during infection. Thus, leukocytosis may simply be a normal physiological parameter that reflects infection. Alternatively, leukocytosis may be an indicator of injury or other disease such as cancer. Leokocytoses, include but are not limited to, eosinophilia, and accumulations of macrophages. In specific embodiments, the polynucleotides, polypeptides, antibodies, and/or agonists or antagonists of the present invention may be useful in diagnosing, prognosing, preventing, and/or treating leukopenia. In other specific embodiments, the polynucleotides, polypeptides, antibodies, and/or agonists or antagonists of the present invention may be useful in diagnosing, prognosing, preventing, and/or treating leukocytosis

[0595] Leukopenia may be a generalized decreased in all types of white blood cells, or may be a specific depletion of particular types of white blood cells. Thus, in specific embodiments, the polynucleotides, polypeptides, antibodies, and/or agonists or antagonists of the present invention may be useful in diagnosing, prognosing, preventing, and/or treating decreases in neutrophil numbers, known as neutropenia. Neutropenias that may be diagnosed, prognosed, prevented, and/or treated by the polynucleotides, polypeptides, antibodies, and/or agonists or antagonists of the present invention include, but are not limited to, infantile genetic agranulocytosis, familial neutropenia, cyclic neutropenia, neutropenias resulting from or associated with dietary deficiencies (e.g., vitamin B 12 deficiency or folic acid deficiency), neutropenias resulting from or associated with drug treatments (e.g., antibiotic regimens such as penicillin treatment, sulfonamide treatment, anticoagulant treatment, anticonvulsant drugs, anti-thyroid drugs, and cancer chemotherapy), and neutropenias resulting from increased neutrophil destruction that may occur in association with some bacterial or viral infections, allergic disorders, autoimmune diseases, conditions in which an individual has an enlarged spleen (e.g., Felty syndrome, malaria and sarcoidosis), and some drug treatment regimens.

[0596] The polynucleotides, polypeptides, antibodies, and/or agonists or antagonists of the present invention may be useful in diagnosing, prognosing, preventing, and/or treating lymphocytopenias (decreased numbers of B and/or T lymphocytes), including, but not limited lymphocytopenias resulting from or associated with stress, drug treatments (e.g., drug treatment with corticosteroids, cancer chemotherapies, and/or radiation therapies), AIDS infection and/or other diseases such as, for example, cancer, rheumatoid arthritis, systemic lupus erythematosus, chronic infections, some viral infections and/or hereditary disorders (e.g., DiGeorge syndrome, Wiskott-Aldrich Syndome, severe combined immunodeficiency, ataxia telangiectsia).

[0597] The polynucleotides, polypeptides, antibodies, and/or agonists or antagonists of the present invention may be useful in diagnosing, prognosing, preventing, and/or treating diseases and disorders associated with macrophage numbers and/or macrophage function including, but not limited to, Gaucher's disease, Niemann-Pick disease, Letterer-Siwe disease and Hand-Schuller-Christian disease.

[0598] In another embodiment, the polynucleotides, polypeptides, antibodies, and/or agonists or antagonists of the present invention may be useful in diagnosing, prognosing, preventing, and/or treating diseases and disorders associated with eosinophil numbers and/or eosinophil function including, but not limited to, idiopathic hypereosinophilic syndrome, eosinophilia-myalgia syndrome, and Hand-Schuller-Christian disease.

[0599] In yet another embodiment, the polynucleotides, polypeptides, antibodies, and/or agonists or antagonists of the present invention may be useful in diagnosing, prognosing, preventing, and/or treating leukemias and lymphomas including, but not limited to, acute lymphocytic (lymphpblastic) leukemia (ALL), acute myeloid (myelocytic, myelogenous, myeloblastic, or myelomonocytic) leukemia, chronic lymphocytic leukemia (e.g., B cell leukemias, T cell leukemias, Sezary syndrome, and Hairy cell leukenia), chronic myelocytic (myeloid, myelogenous, or granulocytic) leukemia, Hodgkin's lymphoma, non-hodgkin's lymphoma, Burkitt's lymphoma, and mycosis fungoides.

[0600] In other embodiments, the polynucleotides, polypeptides, antibodies, and/or agonists or antagonists of the present invention may be useful in diagnosing, prognosing, preventing, and/or treating diseases and disorders of plasma cells including, but not limited to, plasma cell dyscrasias, monoclonal gammaopathies, monoclonal gammopathies of undetermined significance, multiple myeloma, macroglobulinemia, Waldenstrom's macroglobulinemia, cryoglobulinemia, and Raynaud's phenomenon.

[0601] In other embodiments, the polynucleotides, polypeptides, antibodies, and/or agonists or antagonists of the present invention may be useful in treating, preventing, and/or diagnosing myeloproliferative disorders, including but not limited to, polycythemia vera, relative polycythemia, secondary polycythemia, myelofibrosis, acute myelofibrosis, agnogenic myelod metaplasia, thrombocythemia, (including both primary and seconday thrombocythemia) and chronic myelocytic leukemia.

[0602] In other embodiments, the polynucleotides, polypeptides, antibodies, and/or agonists or antagonists of the present invention may be useful as a treatment prior to surgery, to increase blood cell production.

[0603] In other embodiments, the polynucleotides, polypeptides, antibodies, and/or agonists or antagonists of the present invention may be useful as an agent to enhance the migration, phagocytosis, superoxide production, antibody dependent cellular cytotoxicity of neutrophils, eosionophils and macrophages.

[0604] In other embodiments, the polynucleotides, polypeptides, antibodies, and/or agonists or antagonists of the present invention may be useful as an agent to increase the number of stem cells in circulation prior to stem cells pheresis. In another specific embodiment, the polynucleotides, polypeptides, antibodies, and/or agonists or antagonists of the present invention may be useful as an agent to increase the number of stem cells in circulation prior to platelet pheresis.

[0605] In other embodiments, the polynucleotides, polypeptides, antibodies, and/or agonists or antagonists of the present invention may be useful as an agent to increase cytokine production.

[0606] In other embodiments, the polynucleotides, polypeptides, antibodies, and/or agonists or antagonists of the present invention may be useful in preventing, diagnosing, and/or treating primary hematopoietic disorders.

[0607] Hyperproliferative Disorders

[0608] Breast and ovarian associated polynucleotides or polypeptides, or agonists or antagonists thereof, can be used to treat, prevent, diagnose and/or prognose hyperproliferative diseases, disorders, and/or conditions, including neoplasms.

[0609] In a specific embodiment, breast and ovarian associated polynucleotides or polypeptides, or agonists or antagonists thereof, can be used to treat, prevent, and/or diagnose hyperproliferative diseases, disorders, and/or conditions of the breast and ovaries.

[0610] In a preferred embodiment, breast and ovarian associated polynucleotides or polypeptides, or agonists or antagonists thereof, can be used to treat, prevent, and/or diagnose breast and ovarian neoplasms.

[0611] Breast and ovarian associated polynucleotides or polypeptides, or agonists or antagonists of the invention, may inhibit the proliferation of the disorder through direct or indirect interactions. Alternatively, breast and ovarian associated polynucleotides or polypeptides, or agonists or antagonists thereof, may proliferate other cells, which can inhibit the hyperproliferative disorder.

[0612] For example, by increasing an immune response, particularly increasing antigenic qualities of the hyperproliferative disorder or by proliferating differentiating, or mobilizing T-cells, hyperproliferative diseases, disorders, and/or conditions can be treated, prevented, and/or diagnosed. This immune response may be increased by either enhancing an existing immune response, or by initiating a new immune response. Alternatively, decreasing an immune response may also be a method of treating, preventing, and/or diagnosing hyperproliferative diseases, disorders, and/or conditions, such as a chemotherapeutic agent.

[0613] Examples of hyperproliferative diseases, disorders, and/or conditions that can be treated, prevented, and/or diagnosed by breast and ovarian associated polynucleotides or polypeptides, or agonists or antagonists thereof, include, but are not limited to neoplasms located in the: prostate, colon, abdomen, bone, breast, digestive system, liver, pancreas, peritoneum, endocrine glands (adrenal, parathyroid, pituitary, testicles, ovary, thymus, thyroid), eye, head and neck, nervous (central and peripheral), lymphatic system, pelvic, skin, soft tissue, spleen, thoracic, and urogenital.

[0614] Similarly, other hyperproliferative disorders can also be treated or detected by polynucleotides or polypeptides, or agonists or antagonists of the present invention. Examples of such hyperproliferative disorders include, but are not limited to: Acute Childhood Lymphoblastic Leukemia, Acute Lymphoblastic Leukemia, Acute Lymphocytic Leukemia, Acute Myeloid Leukemia, Adrenocortical Carcinoma, Adult (Primary) Hepatocellular Cancer, Adult (Primary) Liver Cancer, Adult Acute Lymphocytic Leukemia, Adult Acute Myeloid Leukemia, Adult Hodgkin's Disease, Adult Hodgkin's Lymphoma, Adult Lymphocytic Leukemia, Adult Non-Hodgkin's Lymphoma, Adult Primary Liver Cancer, Adult Soft Tissue Sarcoma, AIDS-Related Lymphoma, AIDS-Related Malignancies, Anal Cancer, Astrocytoma, Bile Duct Cancer, Bladder Cancer, Bone Cancer, Brain Stem Glioma, Brain Tumors, Breast Cancer, Cancer of the Renal Pelvis and Ureter, Central Nervous System (Primary) Lymphoma, Central Nervous System Lymphoma, Cerebellar Astrocytoma, Cerebral Astrocytoma, Cervical Cancer, Childhood (Primary) Hepatocellular Cancer, Childhood (Primary) Liver Cancer, Childhood Acute Lymphoblastic Leukemia, Childhood Acute Myeloid Leukemia, Childhood Brain Stem Glioma, Childhood Cerebellar Astrocytoma, Childhood Cerebral Astrocytoma, Childhood Extracranial Germ Cell Tumors, Childhood Hodgkin's Disease, Childhood Hodgkin's Lymphoma, Childhood Hypothalamic and Visual Pathway Glioma, Childhood Lymphoblastic Leukemia, Childhood Medulloblastoma, Childhood Non-Hodgkin's Lymphoma, Childhood Pineal and Supratentorial Primitive Neuroectodermal Tumors, Childhood Primary Liver Cancer, Childhood Rhabdomyosarcoma, Childhood Soft Tissue Sarcoma, Childhood Visual Pathway and Hypothalamic Glioma, Chronic Lymphocytic Leukemia, Chronic Myelogenous Leukemia, Colon Cancer, Cutaneous T-Cell Lymphoma, Endocrine Pancreas Islet Cell Carcinoma, Endometrial Cancer, Ependymoma, Epithelial Cancer, Esophageal Cancer, Ewing's Sarcoma and Related Tumors, Exocrine Pancreatic Cancer, Extracranial Germ Cell Tumor, Extragonadal Germ Cell Tumor, Extrahepatic Bile Duct Cancer, Eye Cancer, Female Breast Cancer, Gaucher's Disease, Gallbladder Cancer, Gastric Cancer, Gastrointestinal Carcinoid Tumor, Gastrointestinal Tumors, Germ Cell Tumors, Gestational Trophoblastic Tumor, Hairy Cell Leukemia, Head and Neck Cancer, Hepatocellular Cancer, Hodgkin's Disease, Hodgkin's Lymphoma, Hypergammaglobulinemia, Hypopharyngeal Cancer, Intestinal Cancers, Intraocular Melanoma, Islet Cell Carcinoma, Islet Cell Pancreatic Cancer, Kaposi's Sarcoma, Kidney Cancer, Laryngeal Cancer, Lip and Oral Cavity Cancer, Liver Cancer, Lung Cancer, Lymphoproliferative Disorders, Macroglobulinemia, Male Breast Cancer, Malignant Mesothelioma, Malignant Thymoma, Medulloblastoma, Melanoma, Mesothelioma, Metastatic Occult Primary Squamous Neck Cancer, Metastatic Primary Squamous Neck Cancer, Metastatic Squamous Neck Cancer, Multiple Myeloma, Multiple Myeloma/Plasma Cell Neoplasm, Myelodysplastic Syndrome, Myelogenous Leukemia, Myeloid Leukemia, Myeloproliferative Disorders, Nasal Cavity and Paranasal Sinus Cancer, Nasopharyngeal Cancer, Neuroblastoma, Non-Hodgkin's Lymphoma During Pregnancy, Nonmelanoma Skin Cancer, Non-Small Cell Lung Cancer, Occult Primary Metastatic Squamous Neck Cancer, Oropharyngeal Cancer, Osteo-/Malignant Fibrous Sarcoma, Osteosarcoma/Malignant Fibrous Histiocytoma, Osteosarcoma/Malignant Fibrous Histiocytoma of Bone, Ovarian Epithelial Cancer, Ovarian Germ Cell Tumor, Ovarian Low Malignant Potential Tumor, Pancreatic Cancer, Paraproteinemias, Purpura, Parathyroid Cancer, Penile Cancer, Pheochromocytoma, Pituitary Tumor, Plasma Cell Neoplasm/Multiple Myeloma, Primary Central Nervous System Lymphoma, Primary Liver Cancer, Prostate Cancer, Rectal Cancer, Renal Cell Cancer, Renal Pelvis and Ureter Cancer, Retinoblastoma, Rhabdomyosarcoma, Salivary Gland Cancer, Sarcoidosis Sarcomas, Sezary Syndrome, Skin Cancer, Small Cell Lung Cancer, Small Intestine Cancer, Soft Tissue Sarcoma, Squamous Neck Cancer, Stomach Cancer, Supratentorial Primitive Neuroectodermal and Pineal Tumors, T-Cell Lymphoma, Testicular Cancer, Thymoma, Thyroid Cancer, Transitional Cell Cancer of the Renal Pelvis and Ureter, Transitional Renal Pelvis and Ureter Cancer, Trophoblastic Tumors, Ureter and Renal Pelvis Cell Cancer, Urethral Cancer, Uterine Cancer, Uterine Sarcoma, Vaginal Cancer, Visual Pathway and Hypothalamic Glioma, Vulvar Cancer, Waldenstrom's Macroglobulinemia, Wilms' Tumor, and any other hyperproliferative disease, besides neoplasia, located in an organ system listed above.

[0615] In another preferred embodiment, polynucleotides or polypeptides, or agonists or antagonists of the present invention are used to diagnose, prognose, prevent, and/or treat premalignant conditions and to prevent progression to a neoplastic or malignant state, including but not limited to those disorders described above. Such uses are indicated in conditions known or suspected of preceding progression to neoplasia or cancer, in particular, where non-neoplastic cell growth consisting of hyperplasia, metaplasia, or most particularly, dysplasia has occurred (for review of such abnormal growth conditions, see Robbins and Angell, 1976, Basic Pathology, 2d Ed., W. B. Saunders Co., Philadelphia, pp. 68-79.)

[0616] Hyperplasia is a form of controlled cell proliferation, involving an increase in cell number in a tissue or organ, without significant alteration in structure or function. Hyperplastic disorders which can be diagnosed, prognosed, prevented, and/or treated with compositions of the invention (including polynucleotides, polypeptides, agonists or antagonists) include, but are not limited to, angiofollicular mediastinal lymph node hyperplasia, angiolymphoid hyperplasia with eosinophilia, a typical melanocytic hyperplasia, basal cell hyperplasia, benign giant lymph node hyperplasia, cementum hyperplasia, congenital adrenal hyperplasia, congenital sebaceous hyperplasia, cystic hyperplasia, cystic hyperplasia of the breast, denture hyperplasia, ductal hyperplasia, endometrial hyperplasia, fibromuscular hyperplasia, focal epithelial hyperplasia, gingival hyperplasia, inflammatory fibrous hyperplasia, inflammatory papillary hyperplasia, intravascular papillary endothelial hyperplasia, nodular hyperplasia of prostate, nodular regenerative hyperplasia, pseudoepitheliomatous hyperplasia, senile sebaceous hyperplasia, and verrucous hyperplasia.

[0617] Metaplasia is a form of controlled cell growth in which one type of adult or fully differentiated cell substitutes for another type of adult cell. Metaplastic disorders which can be diagnosed, prognosed, prevented, and/or treated with compositions of the invention (including polynucleotides, polypeptides, agonists or antagonists) include, but are not limited to, agnogenic myeloid metaplasia, apocrine metaplasia, a typical metaplasia, autoparenchymatous metaplasia, connective tissue metaplasia, epithelial metaplasia, intestinal metaplasia, metaplastic anemia, metaplastic ossification, metaplastic polyps, myeloid metaplasia, primary myeloid metaplasia, secondary myeloid metaplasia, squamous metaplasia, squamous metaplasia of amnion, and symptomatic myeloid metaplasia.

[0618] Dysplasia is frequently a forerunner of cancer, and is found mainly in the epithelia; it is the most disorderly form of non-neoplastic cell growth, involving a loss in individual cell uniformity and in the architectural orientation of cells. Dysplastic cells often have abnormally large, deeply stained nuclei, and exhibit pleomorphism. Dysplasia characteristically occurs where there exists chronic irritation or inflammation. Dysplastic disorders which can be diagnosed, prognosed, prevented, and/or treated with compositions of the invention (including polynucleotides, polypeptides, agonists or antagonists) include, but are not limited to, anhidrotic ectodermal dysplasia, anterofacial dysplasia, asphyxiating thoracic dysplasia, atriodigital dysplasia, bronchopulmonary dysplasia, cerebral dysplasia, cervical dysplasia, chondroectodermal dysplasia, cleidocranial dysplasia, congenital ectodermal dysplasia, craniodiaphysial dysplasia, craniocarpotarsal dysplasia, craniometaphysial dysplasia, dentin dysplasia, diaphysial dysplasia, ectodermal dysplasia, enamel dysplasia, encephalo-ophthalmic dysplasia, dysplasia epiphysialis hemimelia, dysplasia epiphysialis multiplex, dyspl-asia epiphysialis punctata, epithelial dysplasia, faciodigitogenital dysplasia, familial fibrous dysplasia of jaws, familial white folded dysplasia, fibromuscular dysplasia, fibrous dysplasia of bone, florid osseous dysplasia, hereditary renal-retinal dysplasia, hidrotic ectodermal dysplasia, hypohidrotic ectodermal dysplasia, lymphopenic thymic dysplasia, mammary dysplasia, mandibulofacial dysplasia, metaphysial dysplasia, Mondini dysplasia, monostotic fibrous dysplasia, mucoepithelial dysplasia, multiple epiphysial dysplasia, oculoauriculovertebral dysplasia, oculodentodigital dysplasia, oculovertebral dysplasia, odontogenic dysplasia, ophthalmomandibulomelic dysplasia, periapical cemental dysplasia, polyostotic fibrous dysplasia, pseudoachondroplastic spondyloepiphysial dysplasia, retinal dysplasia, septo-optic dysplasia, spondyloepiphysial dysplasia, and ventriculoradial dysplasia.

[0619] Additional pre-neoplastic disorders which can be diagnosed, prognosed, prevented, and/or treated with compositions of the invention (including polynucleotides, polypeptides, agonists or antagonists) include, but are not limited to, benign dysproliferative disorders (e.g., benign tumors, fibrocystic conditions, tissue hypertrophy, intestinal polyps, colon polyps, and esophageal dysplasia), leukoplakia, keratoses, Bowen's disease, Farmer's Skin, solar cheilitis, and solar keratosis.

[0620] In another embodiment, a polypeptide of the invention, or polynucleotides, antibodies, agonists, or antagonists corresponding to that polypeptide, may be used to diagnose and/or prognose disorders associated with the tissue(s) in which the polypeptide of the invention is expressed, including one, two, three, four, five, or more tissues disclosed in Table 1A, 7 (Tissue Distribution Library Code).

[0621] In another embodiment, polynucleotides, polypeptides, antibodies, and/or agonists or antagonists of the present invention conjugated to a toxin or a radioactive isotope, as described herein, may be used to treat cancers and neoplasms, including, but not limited to those described herein. In a further preferred embodiment, polynucleotides, polypeptides, antibodies, and/or agonists or antagonists of the present invention conjugated to a toxin or a radioactive isotope, as described herein, may be used to treat acute myelogenous leukemia.

[0622] Additionally, polynucleotides, polypeptides, and/or agonists or antagonists of the invention may affect apoptosis, and therefore, would be useful in treating a number of diseases associated with increased cell survival or the inhibition of apoptosis. For example, diseases associated with increased cell survival or the inhibition of apoptosis that could be diagnosed, prognosed, prevented, and/or treated by polynucleotides, polypeptides, and/or agonists or antagonists of the invention, include cancers (such as follicular lymphomas, carcinomas with p53 mutations, and hormone-dependent tumors, including, but not limited to colon cancer, cardiac tumors, pancreatic cancer, melanoma, retinoblastoma, glioblastoma, lung cancer, intestinal cancer, testicular cancer, stomach cancer, neuroblastoma, myxoma, myoma, lymphoma, endothelioma, osteoblastoma, osteoclastoma, osteosarcoma, chondrosarcoma, adenoma, breast cancer, prostate cancer, Kaposi's sarcoma and ovarian cancer); autoimmune disorders such as, multiple sclerosis, Sjogren's syndrome, Hashimoto's thyroiditis, biliary cirrhosis, Behcet's disease, Crohn's disease, polymyositis, systemic lupus erythematosus and immune-related glomerulonephritis and rheumatoid arthritis) and viral infections (such as herpes viruses, pox viruses and adenoviruses), inflammation, graft v. host disease, acute graft rejection, and chronic graft rejection.

[0623] In preferred embodiments, polynucleotides, polypeptides, and/or agonists or antagonists of the invention are used to inhibit growth, progression, and/or metastasis of cancers, in particular those listed above.

[0624] Additional diseases or conditions associated with increased cell survival that could be diagnosed, prognosed, prevented, and/or treated by polynucleotides, polypeptides, and/or agonists or antagonists of the invention, include, but are not limited to, progression, and/or metastases of malignancies and related disorders such as leukemia (including acute leukemias (e.g., acute lymphocytic leukemia, acute myelocytic leukemia (including myeloblastic, promyelocytic, myelomonocytic, monocytic, and erythroleukemia)) and chronic leukemias (e.g., chronic myelocytic (granulocytic) leukemia and chronic lymphocytic leukemia)), polycythemia vera, lymphomas (e.g., Hodgkin's disease and non-Hodgkin's disease), multiple myeloma, Waldenstrom's macroglobulinemia, heavy chain disease, and solid tumors including, but not limited to, sarcomas and carcinomas such as fibrosarcoma, myxosarcoma, liposarcoma, chondrosarcoma, osteogenic sarcoma, chordoma, angiosarcoma, endotheliosarcoma, lymphangiosarcoma, lymphangioendotheliosarcoma, synovioma, mesothelioma, Ewing's tumor, leiomyosarcoma, rhabdomyosarcoma, colon carcinoma, pancreatic cancer, breast cancer, ovarian cancer, prostate cancer, squamous cell carcinoma, basal cell carcinoma, adenocarcinoma, sweat gland carcinoma, sebaceous gland carcinoma, papillary carcinoma, papillary adenocarcinomas, cystadenocarcinoma, medullary carcinoma, bronchogenic carcinoma, renal cell carcinoma, hepatoma, bile duct carcinoma, choriocarcinoma, seminoma, embryonal carcinoma, Wilm's tumor, cervical cancer, testicular tumor, lung carcinoma, small cell lung carcinoma, bladder carcinoma, epithelial carcinoma, glioma, astrocytoma, medulloblastoma, craniopharyngioma, ependymoma, pinealoma, emangioblastoma, acoustic neuroma, oligodendroglioma, menangioma, melanoma, neuroblastoma, and retinoblastoma.

[0625] Diseases associated with increased apoptosis that could be diagnosed, prognosed, prevented, and/or treated by polynucleotides, polypeptides, and/or agonists or antagonists of the invention, include AIDS; neurodegenerative disorders (such as Alzheimer's disease, Parkinson's disease, amyotrophic lateral sclerosis, retinitis pigmentosa, cerebellar degeneration and brain tumor or prior associated disease); autoimmune disorders (such as, multiple sclerosis, Sjogren's syndrome, Hashimoto's thyroiditis, biliary cirrhosis, Behcet's disease, Crohn's disease, polymyositis, systemic lupus erythematosus and immune-related glomerulonephritis and rheumatoid arthritis) myelodysplastic syndromes (such as aplastic anemia), graft v. host disease, ischemic injury (such as that caused by myocardial infarction, stroke and reperfusion injury), liver injury (e.g., hepatitis related liver injury, ischemia/reperfusion injury, cholestosis (bile duct injury) and liver cancer); toxin-induced liver disease (such as that caused by alcohol), septic shock, cachexia and anorexia.

[0626] Hyperproliferative diseases and/or disorders that could be diagnosed, prognosed, prevented, and/or treated by polynucleotides, polypeptides, and/or agonists or antagonists of the invention, include, but are not limited to, neoplasms located in the liver, abdomen, bone, breast, digestive system, pancreas, peritoneum, endocrine glands (adrenal, parathyroid, pituitary, testicles, ovary, thymus, thyroid), eye, head and neck, nervous system (central and peripheral), lymphatic system, pelvis, skin, soft tissue, spleen, thorax, and urogenital tract.

[0627] Similarly, other hyperproliferative disorders can also be diagnosed, prognosed, prevented, and/or treated by polynucleotides, polypeptides, and/or agonists or antagonists of the invention. Examples of such hyperproliferative disorders include, but are not limited to: hypergammaglobulinemia, lymphoproliferative disorders, paraproteinemias, purpura, sarcoidosis, Sezary Syndrome, Waldenstron's macroglobulinemia, Gaucher's Disease, histiocytosis, and any other hyperproliferative disease, besides neoplasia, located in an organ system listed above.

[0628] One preferred embodiment utilizes polynucleotides of the present invention to inhibit aberrant cellular division, by gene therapy using the present invention, and/or protein fusions or fragments thereof.

[0629] Thus, the present invention provides a method for treating cell proliferative diseases, disorders, and/or conditions by inserting into an abnormally proliferating cell a polynucleotide of the present invention, wherein said polynucleotide represses said cell proliferation, disease, disorder, and/or condition.

[0630] In a preferred embodiment, the present invention provides a method for treating cell proliferative diseases, disorders and/or conditions of the breast and ovaries by inserting into a cell, a polynucleotide of the present invention, wherein said polynucleotide represses said cell proliferation, disease and/or disorder.

[0631] Another embodiment of the present invention provides a method of treating cell-proliferative diseases, disorders, and/or conditions in individuals comprising administration of one or more active gene copies of the present invention to an abnormally proliferating cell or cells. In a preferred embodiment, polynucleotides of the present invention is a DNA construct comprising a recombinant expression vector effective in expressing a DNA sequence encoding said polynucleotides. In another preferred embodiment of the present invention, the DNA construct encoding the polynucleotides of the present invention is inserted into cells to be treated utilizing a retrovirus, or more preferably an adenoviral vector (see, e.g., G J. Nabel, et. al., PNAS 96: 324-326 (1999), which is hereby incorporated by reference). In a most preferred embodiment, the viral vector is defective and will not transform non-proliferating cells, only proliferating cells. Moreover, in a preferred embodiment, the polynucleotides of the present invention inserted into proliferating cells either alone, or in combination with or fused to other polynucleotides, can then be modulated via an external stimulus (i.e., magnetic, specific small molecule, chemical, or drug administration, etc.), which acts upon the promoter upstream of said polynucleotides to induce expression of the encoded protein product. As such the beneficial therapeutic affect of the present invention may be expressly modulated (i.e., to increase, decrease, or inhibit expression of the present invention) based upon said external stimulus.

[0632] Polynucleotides of the present invention may be useful in repressing expression of oncogenic genes or antigens. By “repressing expression of the oncogenic genes is intended the suppression of the transcription of the gene, the degradation of the gene transcript (pre-message RNA), the inhibition of splicing, the destruction of the messenger RNA, the prevention of the post-translational modifications of the protein, the destruction of the protein, or the inhibition of the normal function of the protein.

[0633] For local administration to abnormally proliferating cells, polynucleotides of the present invention may be administered by any method known to those of skill in the art including, but not limited to transfection, electroporation, microinjection of cells, or in vehicles such as liposomes, lipofectin, or as naked polynucleotides, or any other method described throughout the specification. The polynucleotide of the present invention may be delivered by known gene delivery systems such as, but not limited to, retroviral vectors (Gilboa, J. Virology 44:845 (1982); Hocke, Nature 320:275 (1986); Wilson, et al., Proc. Natl. Acad. Sci. U.S.A. 85:3014), vaccinia virus system (Chakrabarty et al., Mol. Cell Biol. 5:3403 (1985) or other efficient DNA delivery systems (Yates et al., Nature 313:812 (1985)) known to those skilled in the art. These references are exemplary only and are hereby incorporated by reference. In order to specifically deliver or transfect cells which are abnormally proliferating and spare non-dividing cells, it is preferable to utilize a retrovirus, or adenoviral (as described in the art and elsewhere herein) delivery system known to those of skill in the art. Since host DNA replication is required for retroviral DNA to integrate and the retrovirus will be unable to self replicate due to the lack of the retrovirus genes needed for its life cycle. Utilizing such a retroviral delivery system for polynucleotides of the present invention will target said gene and constructs to abnormally proliferating cells and will spare the non-dividing normal cells.

[0634] The polynucleotides of the present invention may be delivered directly to cell proliferative disorder/disease sites in internal organs, body cavities and the like by use of imaging devices used to guide an injecting needle directly to the disease site. The polynucleotides of the present invention may also be administered to disease sites at the time of surgical intervention.

[0635] By “cell proliferative disease” is meant any human or animal disease or disorder, affecting any one or any combination of organs, cavities, or body parts, which is characterized by single or multiple local abnormal proliferations of cells, groups of cells, or tissues, whether benign or malignant.

[0636] Any amount of the polynucleotides of the present invention may be administered as long as it has a biologically inhibiting effect on the proliferation of the treated cells. Moreover, it is possible to administer more than one of the polynucleotide of the present invention simultaneously to the same site. By “biologically inhibiting” is meant partial or total growth inhibition as well as decreases in the rate of proliferation or growth of the cells. The biologically inhibitory dose may be determined by assessing the effects of the polynucleotides of the present invention on target malignant or abnormally proliferating cell growth in tissue culture, tumor growth in animals and cell cultures, or any other method known to one of ordinary skill in the art.

[0637] The present invention is further directed to antibody-based therapies which involve administering of anti-polypeptides and anti-polynucleotide antibodies to a mammalian, preferably human, patient for treating one or more of the described diseases, disorders, and/or conditions. Methods for producing anti-polypeptides and anti-polynucleotide antibodies polyclonal and monoclonal antibodies are described in detail elsewhere herein. Such antibodies may be provided in pharmaceutically acceptable compositions as known in the art or as described herein.

[0638] A summary of the ways in which the antibodies of the present invention may be used therapeutically includes binding polynucleotides or polypeptides of the present invention locally or systemically in the body or by direct cytotoxicity of the antibody, e.g., as mediated by complement (CDC) or by effector cells (ADCC). Some of these approaches are described in more detail below. Armed with the teachings provided herein, one of ordinary skill in the art will know how to use the antibodies of the present invention for diagnostic, monitoring or therapeutic purposes without undue experimentation.

[0639] In particular, the antibodies, fragments and derivatives of the present invention are useful for treating a subject having or developing cell proliferative and/or differentiation diseases, disorders, and/or conditions as described herein. Such treatment comprises administering a single or multiple doses of the antibody, or a fragment, derivative, or a conjugate thereof.

[0640] The antibodies of this invention may be advantageously utilized in combination with other monoclonal or chimeric antibodies, or with lymphokines or hematopoietic growth factors, for example, which serve to increase the number or activity of effector cells which interact with the antibodies.

[0641] It is preferred to use high affinity and/or potent in vivo inhibiting and/or neutralizing antibodies against polypeptides or polynucleotides of the present invention, fragments or regions thereof, for both immunoassays directed to and therapy of diseases, disorders, and/or conditions related to polynucleotides or polypeptides, including fragments thereof, of the present invention. Such antibodies, fragments, or regions, will preferably have an affinity for polynucleotides or polypeptides, including fragments thereof. Preferred binding affinities include those with a dissociation constant or Kd less than 5×10⁻⁶M, 10⁻⁶M, 5×10⁻⁷M, 10⁻⁷M, 5×10⁻⁸M, 10⁻⁸M, 5×10⁻⁹M, 10⁻⁹M, 5×10⁻¹⁰M, 10⁻¹⁰M, 5×10⁻¹¹M, 10⁻¹¹M, 5×10⁻¹²M, 10⁻¹²M, 5×10⁻¹³M, 10⁻¹³M, 5×10⁻¹⁴M, 10⁻¹⁴M, 5×10⁻¹⁵M, and 10⁻¹⁵M.

[0642] Moreover, breast and ovarian antigen polypeptides of the present invention or fragments thereof, are useful in inhibiting the angiogenesis of proliferative cells or tissues, either alone, as a protein fusion, or in combination with other polypeptides directly or indirectly, as described elsewhere herein. In a most preferred embodiment, said anti-angiogenesis effect may be achieved indirectly, for example, through the inhibition of hematopoietic, tumor-specific cells, such as tumor-associated macrophages (see, e.g., Joseph I B, et al. J Natl Cancer Inst, 90(21):1648-53(1998), which is hereby incorporated by reference). Antibodies directed to polypeptides or polynucleotides of the present invention may also result in inhibition of angiogenesis directly, or indirectly (see, e.g., Witte L, et al., Cancer Metastasis Rev. 17(2):155-61 (1998), which is hereby incorporated by reference)).

[0643] Polypeptides, including protein fusions, of the present invention, or fragments thereof may be useful in inhibiting proliferative cells or tissues through the induction of apoptosis. Said polypeptides may act either directly, or indirectly to induce apoptosis of proliferative cells and tissues, for example in the activation of a death-domain receptor, such as tumor necrosis factor (TNF) receptor-1, CD95 (Fas/APO-1), TNF-receptor-related apoptosis-mediated protein (TRAMP) and TNF-related apoptosis-inducing ligand (TRAIL) receptor-1 and -2 (see, e.g., Schulze-Osthoff K, et. al., Eur J Biochem 254(3):439-59 (1998), which is hereby incorporated by reference). Moreover, in another preferred embodiment of the present invention, said polypeptides may induce apoptosis through other mechanisms, such as in the activation of other proteins which will activate apoptosis, or through stimulating the expression of said proteins, either alone or in combination with small molecule drugs or adjuvants, such as apoptonin, galectins, thioredoxins, antiinflammatory proteins (See for example, Mutat. Res. 400(1-2):447-55 (1998), Med Hypotheses.50(5):423-33 (1998), Chem. Biol. Interact. April 24;111-112:23-34 (1998), J. Mo. Med. 76(6):402-12 (1998), Int. J. Tissue React. 20(1):3-15 (1998), which are all hereby incorporated by reference).

[0644] Polypeptides, including protein fusions to, or fragments thereof, of the present invention are useful in inhibiting the metastasis of proliferative cells or tissues. Inhibition may occur as a direct result of administering polypeptides, or antibodies directed to said polypeptides as described elsewhere herein, or indirectly, such as activating the expression of proteins known to inhibit metastasis, for example alpha 4 integrins, (See, e.g., Curr Top Microbiol Immunol 1998;231:125-41, which is hereby incorporated by reference). Such therapeutic affects of the present invention may be achieved either alone, or in combination with small molecule drugs or adjuvants.

[0645] In another embodiment, the invention provides a method of delivering compositions containing the polypeptides of the invention (e.g., compositions containing polypeptides or anti-breast and ovarian antigen polypeptide antibodies associated with heterologous polypeptides, heterologous nucleic acids, toxins, or prodrugs) to targeted cells expressing the polypeptide of the present invention. Breast and ovarian antigen polypeptides or anti-breast and ovarian antigen polypeptide antibodies of the invention may be associated with heterologous polypeptides, heterologous nucleic acids, toxins, or prodrugs via hydrophobic, hydrophilic, ionic and/or covalent interactions.

[0646] Polypeptides, protein fusions to, or fragments thereof, of the present invention are useful in enhancing the immunogenicity and/or antigenicity of proliferating cells or tissues, either directly, such as would occur if the polypeptides of the present invention ‘vaccinated’ the immune response to respond to proliferative antigens and immunogens, or indirectly, such as in activating the expression of proteins known to enhance the immune response (e.g. chemokines), to said antigens and immunogens.

[0647] Urinary System Disorders

[0648] Polynucleotides, polypeptides, antibodies, and/or agonists or antagonists of the present invention, may be used to treat, prevent, diagnose, and/or prognose disorders of the urinary system, including but not limited to disorders of the renal system, bladder, ureters, and urethra. Renal disorders include, but are not limited to, kidney failure, nephritis, blood vessel disorders of kidney, metabolic and congenital kidney disorders, urinary disorders of the kidney, autoimmune disorders, sclerosis and necrosis, electrolyte imbalance, and kidney cancers.

[0649] Kidney failure diseases include, but are not limited to, acute kidney failure, chronic kidney failure, atheroembolic renal failure, and end-stage renal disease. Inflammatory diseases of the kidney include acute glomerulonephritis, postinfectious glomerulonephritis, rapidly progressive glomerulonephritis, nephrotic syndrome, membranous glomerulonephritis, familial nephrotic syndrome, membranoproliferative glomerulonephritis I and II, mesangial proliferative glomerulonephritis, chronic glomerulonephritis, acute tubulointerstitial nephritis, chronic tubulointerstitial nephritis, acute post-streptococcal glomerulonephritis (PSGN), pyelonephritis, lupus nephritis, chronic nephritis, interstitial nephritis, and post-streptococcal glomerulonephritis.

[0650] Blood vessel disorders of the kidneys include, but are not limited to, kidney infarction, atheroembolic kidney disease, cortical necrosis, malignant nephrosclerosis, renal vein thrombosis, renal underperfusion, renal ischemia-reperfusion, renal artery embolism, and renal artery stenosis. Kidney disorders resulting form urinary tract problems include, but are not limited to, pyelonephritis, hydronephrosis, urolithiasis (renal lithiasis, nephrolithiasis), reflux nephropathy, urinary tract infections, urinary retention, and acute or chronic unilateral obstructive uropathy.

[0651] Metabolic and congenital disorders of the kidneys include, but are not limited to, renal tubular acidosis, renal glycosuria, nephrogenic diabetes insipidus, cystinuria, Fanconi's syndrome, vitamin D-resistant rickets, Hartnup disease, Bartter's syndrome, Liddle's syndrome, polycystic kidney disease, medullary cystic disease, medullary sponge kidney, Alport's syndrome, nail-patella syndrome, congenital nephrotic syndrome, CRUSH syndrome, horseshoe kidney, diabetic nephropathy, nephrogenic diabetes insipidus, analgesic nephropathy, kidney stones, and membranous nephropathy, Kidney disorders resulting from an autoimmune response include, but are not limited to, systemic lupus erythematosus (SLE), Goodpasture syndrome, IgA nephropathy, and IgM mesangial proliferative glomerulonephritis.

[0652] Sclerotic or necrotic disorders of the kidney include, but are not limited to, glomerulosclerosis, diabetic nephropathy, focal segmental glomerulosclerosis (FSGS), necrotizing glomerulonephritis, and renal papillary necrosis. Kidneys may also develop carcinomas, including, but not limited to, hypemephroma, nephroblastoma, renal cell cancer, transitional cell cancer, squamous cell cancer, and Wilm's tumor.

[0653] Kidney disorders may also result in electrolyte imbalances, including, but not limited to, nephrocalcinosis, pyuria, edema, hydronephritis, proteinuria, hyponatremia, hypernatremia, hypokalemia, hyperkalemia, hypocalcemia, hypercalcemia, hypophosphatemia, and hyperphosphatemia.

[0654] Bladder disorders include, but are not limited to, benign prostatic hyperplasia (BPH), interstitial cystitis (IC), prostatitis, proteinuria, urinary tract infections, urinary incontinence, urinary retention. Disorders of the ureters and urethra include, but are not limited to, acute or chronic unilateral obstructive uropathy. The bladder, ureters, and urethra may also develop carcinomas, including, but not limited to, superficial bladder canccer, invasive bladder cancer, carcinoma of the ureter, and urethra cancers.

[0655] Polypeptides may be administered using any method known in the art, including, but not limited to, direct needle injection at the delivery site, intravenous injection, topical administration, catheter infusion, biolistic injectors, particle accelerators, gelfoam sponge depots, other commercially available depot materials, osmotic pumps, oral or suppositorial solid pharmaceutical formulations, decanting or topical applications during surgery, aerosol delivery. Such methods are known in the art. Polypeptides may be administered as part of a Therapeutic, described in more detail below. Methods of delivering polynucleotides are described in more detail herein.

[0656] Cardiovascular Disorders

[0657] Polynucleotides or polypeptides, or agonists or antagonists of the present invention, may be used to treat, prevent, diagnose, and/or prognose cardiovascular disorders, including, but not limited to, peripheral artery disease, such as limb ischemia.

[0658] Cardiovascular disorders include cardiovascular abnormalities, such as arterio-arterial fistula, arterioyenous fistula, cerebral arterioyenous malformations, congenital heart defects, pulmonary atresia, and Scimitar Syndrome. Congenital heart defects include aortic coarctation, cor triatriatum, coronary vessel anomalies, crisscross heart, dextrocardia, patent ductus arteriosus, Ebstein's anomaly, Eisenmenger complex, hypoplastic left heart syndrome, levocardia, tetralogy of fallot, transposition of great vessels, double outlet right ventricle, tricuspid atresia, persistent truncus arteriosus, total anomalous pulmonary venous connection, hypoplastic left heart syndrome, and heart septal defects, such as aortopulmonary septal defect, endocardial cushion defects, Lutembacher's Syndrome, atrioventricular canal defect, trilogy of Fallot, ventricular heart septal defects.

[0659] Cardiovascular disorders also include heart disease, such as arrhythmias, carcinoid heart disease, high cardiac output, low cardiac output, cardiac tamponade, endocarditis (including bacterial), heart aneurysm, cardiac arrest, sudden cardiac death, congestive heart failure, congestive cardiomyopathy, paroxysmal dyspnea, cardiac edema, heart hypertrophy, congestive cardiomyopathy, left ventricular hypertrophy, right ventricular hypertrophy, post-infarction heart rupture, ventricular septal rupture, heart valve diseases, myocardial diseases, myocardial ischemia, pericardial effusion, pericarditis (including constrictive and tuberculous), pneumopericardium, postpericardiotomy syndrome, pulmonary heart disease, rheumatic heart disease, ventricular dysfunction, hyperemia, cardiovascular pregnancy complications, Scimitar Syndrome, diastolic dysfunction, enlarged heart, heart block, J-curve phenomenon, rheumatic heart disease, Marfan syndrome, cardiovascular syphilis, and cardiovascular tuberculosis.

[0660] Arrhythmias include sinus arrhythmia, atrial fibrillation, atrial flutter, bradycardia, extrasystole, Adams-Stokes Syndrome, bundle-branch block, sinoatrial block, long QT syndrome, parasystole, Lown-Ganong-Levine Syndrome, Mahaim-type pre-excitation syndrome, Wolff-Parkinson-White syndrome, sick sinus syndrome, tachycardias, and ventricular fibrillation. Tachycardias include paroxysmal tachycardia, supraventricular tachycardia, accelerated idioventricular rhythm, atrioventricular nodal reentry tachycardia, ectopic atrial tachycardia, ectopic junctional tachycardia, sinoatrial nodal reentry tachycardia, sinus tachycardia, Torsades de Pointes, and ventricular tachycardia.

[0661] Heart valve disease include aortic valve insufficiency, aortic valve stenosis, heart murmurs, aortic valve prolapse, mitral valve prolapse, tricuspid valve prolapse, mitral valve insufficiency, mitral valve stenosis, pulmonary atresia, pulmonary valve insufficiency, pulmonary valve stenosis, tricuspid atresia, tricuspid valve insufficiency, tricuspid valve stenosis, and bicuspid aortic valve.

[0662] Myocardial diseases include alcoholic cardiomyopathy, congestive cardiomyopathy, hypertrophic cardiomyopathy, aortic subvalvular stenosis, pulmonary subvalvular stenosis, restrictive cardiomyopathy, Chagas cardiomyopathy, endocardial fibroelastosis, endomyocardial fibrosis, Kearns Syndrome, Barth syndrome, myocardial reperfusion injury, and myocarditis.

[0663] Myocardial ischemias include coronary disease, such as angina pectoris, Prinzmetal's angina, unstable angina, coronary aneurysm, coronary arteriosclerosis, coronary thrombosis, coronary vasospasm, myocardial infarction and myocardial stunning.

[0664] Cardiovascular diseases also include vascular diseases such as aneurysms, angiodysplasia, angiomatosis, bacillary angiomatosis, Hippel-Lindau Disease, Klippel-Trenaunay-Weber Syndrome, Sturge-Weber Syndrome, angioneurotic edema, aortic diseases, Takayasu's Arteritis, aortitis, Leriche's Syndrome, arterial occlusive diseases, arteritis, enarteritis, polyarteritis nodosa, cerebrovascular disorders, diabetic angiopathies, diabetic retinopathy, embolisms, thrombosis, erythromelalgia, hemorrhoids, hepatic veno-occlusive disease, hypertension, hypotension (shock), ischemia, peripheral vascular diseases, phlebitis, superficial phlebitis, pulmonary veno-occlusive disease, chronic obstructive pulmonary disease, Buerger's disease, Raynaud's disease, CREST syndrome, retinal vein occlusion, Scimitar syndrome, superior vena cava syndrome, telangiectasia, atacia telangiectasia, hereditary hemorrhagic telangiectasia, deep vein thrombosis, varicocele, varicose veins, varicose ulcer, vasculitis, and venous insufficiency.

[0665] Aneurysms include dissecting aneurysms, false aneurysms, infected aneurysms, ruptured aneurysms, aortic aneurysms, cerebral aneurysms, coronary aneurysms, heart aneurysms, and iliac aneurysms.

[0666] Arterial occlusive diseases include arteriosclerosis, arteriolosclerosis, atherosclerosis, intermittent claudication, carotid stenosis, fibromuscular dysplasias, mesenteric vascular occlusion, Moyamoya disease, renal artery obstruction, retinal artery occlusion, and thromboangiitis obliterans.

[0667] Cerebrovascular disorders include carotid artery diseases, cerebral amyloid angiopathy, cerebral aneurysm, cerebral anoxia, cerebral arteriosclerosis, cerebral arterioyenous malformation, cerebral artery diseases, cerebral embolism and thrombosis, carotid artery thrombosis, sinus thrombosis, Wallenberg's syndrome, cerebral hemorrhage, epidural hematoma, subdural hematoma, subaraxhnoid hemorrhage, cerebral infarction, cerebral ischemia (including transient), subclavian steal syndrome, periventricular leukomalacia, vascular headache, cluster headache, migraine, and vertebrobasilar insufficiency.

[0668] Embolisms include air embolisms, amniotic fluid embolisms, cholesterol embolisms, blue toe syndrome, fat embolisms, pulmonary embolisms, and thromoboembolisms. Thrombosis include coronary thrombosis, hepatic vein thrombosis, deep vein thrombosis, retinal vein occlusion, carotid artery thrombosis, sinus thrombosis, Wallenberg's syndrome, and thrombophlebitis.

[0669] Ischemia includes cerebral ischemia, ischemic colitis, silent ischemia, compartment syndromes, anterior compartment syndrome, myocardial ischemia, reperfusion injuries, and peripheral limb ischemia. Vasculitis includes aortitis, arteritis, Behcet's Syndrome, Churg-Strauss Syndrome, mucocutaneous lymph node syndrome, thromboangiitis obliterans, hypersensitivity vasculitis, Schoenlein-Henoch purpura, allergic cutaneous vasculitis, and Wegener's granulomatosis.

[0670] Cardiovascular diseases can also occur due to electrolyte imbalances that include, but are not limited to hyponatremia, hypernatremia, hypokalemia, hyperkalemia, hypocalcemia, hypercalcemia, hypophosphatemia, and hyperphophatemia. Neoplasm and/or cancers of the cardiovascular system include, but are not limited to, myxomas, fibromas, and rhabdomyomas.

[0671] Polypeptides may be administered using any method known in the art, including, but not limited to, direct needle injection at the delivery site, intravenous injection, topical administration, catheter infusion, biolistic injectors, particle accelerators, gelfoam sponge depots, other commercially available depot materials, osmotic pumps, oral or suppositorial solid pharmaceutical formulations, decanting or topical applications during surgery, aerosol delivery. Such methods are known in the art. Polypeptides may be administered as part of a Therapeutic, described in more detail below. Methods of delivering polynucleotides are described in more detail herein.

[0672] Respiratory Disorders

[0673] Polynucleotides or polypeptides, or agonists or antagonists of the present invention may be used to treat, prevent, diagnose, and/or prognose diseases and/or disorders of the respiratory system.

[0674] Diseases and disorders of the respiratory system include, but are not limited to, nasal vestibulitis, nonallergic rhinitis (e.g., acute rhinitis, chronic rhinitis, atrophic rhinitis, vasomotor rhinitis), nasal polyps, and sinusitis, juvenile angiofibromas, cancer of the nose and juvenile papillomas, vocal cord polyps, nodules (singer's nodules), contact ulcers, vocal cord paralysis, laryngoceles, pharyngitis (e.g., viral and bacterial), tonsillitis, tonsillar cellulitis, parapharyngeal abscess, laryngitis, laryngoceles, and throat cancers (e.g., cancer of the nasopharynx, tonsil cancer, larynx cancer), lung cancer (e.g., squamous cell carcinoma, small cell (oat cell) carcinoma, large cell carcinoma, and adenocarcinoma), allergic disorders (eosinophilic pneumonia, hypersensitivity pneumonitis (e.g., extrinsic allergic alveolitis, allergic interstitial pneumonitis, organic dust pneumoconiosis, allergic bronchopulmonary aspergillosis, asthma, Wegener's granulomatosis (granulomatous vasculitis), Goodpasture's syndrome)), pneumonia (e.g., bacterial pneumonia (e.g., Streptococcus pneumoniae (pneumoncoccal pneumonia), Staphylococcus aureus (staphylococcal pneumonia), Gram-negative bacterial pneumonia (caused by, e.g., Klebsiella and Pseudomas spp.), Mycoplasma pneumoniae pneumonia, Hemophilus influenzae pneumonia, Legionella pneumophila (Legionnaires' disease), and Chlamydia psittaci (Psittacosis)), and viral pneumonia (e.g., influenza, chickenpox (varicella).

[0675] Additional diseases and disorders of the respiratory system include, but are not limited to bronchiolitis, polio (poliomyelitis), croup, respiratory syncytial viral infection, mumps, erythema infectiosum (fifth disease), roseola infantum, progressive rubella panencephalitis, german measles, and subacute sclerosing panencephalitis), fungal pneumonia (e.g., Histoplasmosis, Coccidioidomycosis, Blastomycosis, fungal infections in people with severely suppressed immune systems (e.g., cryptococcosis, caused by Cryptococcus neoformans; aspergillosis, caused by Aspergillus spp.; candidiasis, caused by Candida; and mucormycosis)), Pneumocystis carinii (pneumocystis pneumonia), a typical pneumonias (e.g., Mycoplasma and Chlamydia spp.), opportunistic infection pneumonia, nosocomial pneumonia, chemical pneumonitis, and aspiration pneumonia, pleural disorders (e.g., pleurisy, pleural effusion, and pneumothorax (e.g., simple spontaneous pneumothorax, complicated spontaneous pneumothorax, tension pneumothorax)), obstructive airway diseases (e.g., asthma, chronic obstructive pulmonary disease (COPD), emphysema, chronic or acute bronchitis), occupational lung diseases (e.g., silicosis, black lung (coal workers' pneumoconiosis), asbestosis, berylliosis, occupational asthsma, byssinosis, and benign pneumoconioses), Infiltrative Lung Disease (e.g., pulmonary fibrosis (e.g., fibrosing alveolitis, usual interstitial pneumonia), idiopathic pulmonary fibrosis, desquamative interstitial pneumonia, lymphoid interstitial pneumonia, histiocytosis X (e.g., Letterer-Siwe disease, Hand-Schüller-Christian disease, eosinophilic granuloma), idiopathic pulmonary hemosiderosis, sarcoidosis and pulmonary alveolar proteinosis), Acute respiratory distress syndrome (also called, e.g., adult respiratory distress syndrome), edema, pulmonary embolism, bronchitis (e.g., viral, bacterial), bronchiectasis, atelectasis, lung abscess (caused by, e.g., Staphylococcus aureus or Legionella pneumophila), and cystic fibrosis.

[0676] Anti-Angiogenesis Activity

[0677] The naturally occurring balance between endogenous stimulators and inhibitors of angiogenesis is one in which inhibitory influences predominate. Rastinejad et al., Cell 56:345-355 (1989). In those rare instances in which neovascularization occurs under normal physiological conditions, such as wound healing, organ regeneration, embryonic development, and female reproductive processes, angiogenesis is stringently regulated and spatially and temporally delimited. Under conditions of pathological angiogenesis such as that characterizing solid tumor growth, these regulatory controls fail. Unregulated angiogenesis becomes pathologic and sustains progression of many neoplastic and non-neoplastic diseases. A number of serious diseases are dominated by abnormal neovascularization including solid tumor growth and metastases, arthritis, some types of eye disorders, and psoriasis. See, e.g., reviews by Moses et al., Biotech. 9:630-634 (1991); Folkman et al., N. Engl. J. Med., 333:1757-1763 (1995); Auerbach et al., J. Microvasc. Res. 29:401-411 (1985); Folkman, Advances in Cancer Research, eds. Klein and Weinhouse, Academic Press, New York, pp. 175-203 (1985); Patz, Am. J. Opthalmol. 94:715-743 (1982); and Folkman et al., Science 221:719-725 (1983). In a number of pathological conditions, the process of angiogenesis contributes to the disease state. For example, significant data have accumulated which suggest that the growth of solid tumors is dependent on angiogenesis. Folkman and Klagsbrun, Science 235:442-447 (1987).

[0678] The present invention provides for treatment of diseases or disorders associated with neovascularization by administration of the polynucleotides and/or polypeptides of the invention, as well as agonists or antagonists of the present invention. Malignant and metastatic conditions which can be treated with the polynucleotides and polypeptides, or agonists or antagonists of the invention include, but are not limited to, malignancies, solid tumors, and cancers described herein and otherwise known in the art (for a review of such disorders, see Fishman et al., Medicine, 2d Ed., J. B. Lippincott Co., Philadelphia (1985)). Thus, the present invention provides a method of treating an angiogenesis-related disease and/or disorder, comprising administration to an individual in need thereof a therapeutically effective amount of a polynucleotide, polypeptide, antagonist and/or agonist of the invention. For example, polynucleotides, polypeptides, antagonists and/or agonists may be utilized in a variety of additional methods in order to therapeutically treat a cancer or tumor. Cancers which may be treated with polynucleotides, polypeptides, antagonists and/or agonists include, but are not limited to solid tumors, including prostate, lung, breast, ovarian, stomach, pancreas, larynx, esophagus, testes, liver, parotid, biliary tract, colon, rectum, cervix, uterus, endometrium, kidney, bladder, thyroid cancer; primary tumors and metastases; melanomas; glioblastoma; Kaposi's sarcoma; leiomyosarcoma; non-small cell lung cancer; colorectal cancer; advanced malignancies; and blood born tumors such as leukemias. For example, polynucleotides, polypeptides, antagonists and/or agonists may be delivered topically, in order to treat cancers such as skin cancer, head and neck tumors, breast tumors, and Kaposi's sarcoma.

[0679] Within yet other aspects, polynucleotides, polypeptides, antagonists and/or agonists may be utilized to treat superficial forms of bladder cancer by, for example, intravesical administration. Polynucleotides, polypeptides, antagonists and/or agonists may be delivered directly into the tumor, or near the tumor site, via injection or a catheter. Of course, as the artisan of ordinary skill will appreciate, the appropriate mode of administration will vary according to the cancer to be treated. Other modes of delivery are discussed herein.

[0680] Polynucleotides, polypeptides, antagonists and/or agonists may be useful in treating other disorders, besides cancers, which involve angiogenesis. These disorders include, but are not limited to: benign tumors, for example hemangiomas, acoustic neuromas, neurofibromas, trachomas, and pyogenic granulomas; artheroscleric plaques; ocular angiogenic diseases, for example, diabetic retinopathy, retinopathy of prematurity, macular degeneration, corneal graft rejection, neovascular glaucoma, retrolental fibroplasia, rubeosis, retinoblastoma, uvietis and Pterygia (abnormal blood vessel growth) of the eye; rheumatoid arthritis; psoriasis; delayed wound healing; endometriosis; vasculogenesis; granulations; hypertrophic scars (keloids); nonunion fractures; scleroderma; trachoma; vascular adhesions; myocardial angiogenesis; coronary collaterals; cerebral collaterals; arterioyenous malformations; ischemic limb angiogenesis; Osler-Webber Syndrome; plaque neovascularization; telangiectasia; hemophiliac joints; angiofibroma; fibromuscular dysplasia; wound granulation; Crohn's disease; and atherosclerosis.

[0681] For example, within one aspect of the present invention methods are provided for treating hypertrophic scars and keloids, comprising the step of administering a polynucleotide, polypeptide, antagonist and/or agonist of the invention to a hypertrophic scar or keloid.

[0682] Within one embodiment of the present invention polynucleotides, polypeptides, antagonists and/or agonists of the invention are directly injected into a hypertrophic scar or keloid, in order to prevent the progression of these lesions. This therapy is of particular value in the prophylactic treatment of conditions which are known to result in the development of hypertrophic scars and keloids (e.g., burns), and is preferably initiated after the proliferative phase has had time to progress (approximately 14 days after the initial injury), but before hypertrophic scar or keloid development. As noted above, the present invention also provides methods for treating neovascular diseases of the eye, including for example, corneal neovascularization, neovascular glaucoma, proliferative diabetic retinopathy, retrolental fibroplasia and macular degeneration.

[0683] Moreover, ocular disorders associated with neovascularization which can be treated with the polynucleotides and polypeptides of the present invention (including agonists and/or antagonists) include, but are not limited to: neovascular glaucoma, diabetic retinopathy, retinoblastoma, retrolental fibroplasia, uveitis, retinopathy of prematurity macular degeneration, corneal graft neovascularization, as well as other eye inflammatory diseases, ocular tumors and diseases associated with choroidal or iris neovascularization. See, e.g., reviews by Waltman et al., Am. J. Ophthal. 85:704-710 (1978) and Gartner et al., Surv. Ophthal. 22:291-312 (1978).

[0684] Thus, within one aspect of the present invention methods are provided for treating neovascular diseases of the eye such as corneal neovascularization (including corneal graft neovascularization), comprising the step of administering to a patient a therapeutically effective amount of a compound (as described above) to the cornea, such that the formation of blood vessels is inhibited. Briefly, the cornea is a tissue, which normally lacks blood vessels. In certain pathological conditions however, capillaries may extend into the cornea from the pericorneal vascular plexus of the limbus. When the cornea becomes vascularized, it also becomes clouded, resulting in a decline in the patient's visual acuity. Visual loss may become complete if the cornea completely opacitates. A wide variety of disorders can result in corneal neovascularization, including for example, corneal infections (e.g., trachoma, herpes simplex keratitis, leishmaniasis and onchocerciasis), immunological processes (e.g., graft rejection and Stevens-Johnson's syndrome), alkali burns, trauma, inflammation (of any cause), toxic and nutritional deficiency states, and as a complication of wearing contact lenses.

[0685] Within particularly preferred embodiments of the invention, may be prepared for topical administration in saline (combined with any of the preservatives and antimicrobial agents commonly used in ocular preparations), and administered in eyedrop form. The solution or suspension may be prepared in its pure form and administered several times daily. Alternatively, anti-angiogenic compositions, prepared as described above, may also be administered directly to the cornea. Within preferred embodiments, the anti-angiogenic composition is prepared with a muco-adhesive polymer, which binds to cornea. Within further embodiments, the anti-angiogenic factors or anti-angiogenic compositions may be utilized as an adjunct to conventional steroid therapy. Topical therapy may also be useful prophylactically in corneal lesions which are known to have a high probability of inducing an angiogenic response (such as chemical burns). In these instances the treatment, likely in combination with steroids, may be instituted immediately to help prevent subsequent complications.

[0686] Within other embodiments, the compounds described above may be injected directly into the corneal stroma by an ophthalmologist under microscopic guidance. The preferred site of injection may vary with the morphology of the individual lesion, but the goal of the administration would be to place the composition at the advancing front of the vasculature (i.e., interspersed between the blood vessels and the normal cornea). In most cases this would involve perilimbic corneal injection to “protect” the cornea from the advancing blood vessels. This method may also be utilized shortly after a corneal insult in order to prophylactically prevent corneal neovascularization. In this situation, the material could be injected in the perilimbic cornea interspersed between the corneal lesion and its undesired potential limbic blood supply. Such methods may also be utilized in a similar fashion to prevent capillary invasion of transplanted corneas. In a sustained-release form, injections might only be required 2-3 times per year. A steroid could also be added to the injection solution to reduce inflammation resulting from the injection itself.

[0687] Within another aspect of the present invention, methods are provided for treating neovascular glaucoma, comprising the step of administering to a patient a therapeutically effective amount of a polynucleotide, polypeptide, antagonist and/or agonist to the eye, such that the formation of blood vessels is inhibited. In one embodiment, the compound may be administered topically to the eye in order to treat early forms of neovascular glaucoma. Within other embodiments, the compound may be implanted by injection into the region of the anterior chamber angle. Within other embodiments, the compound may also be placed in any location such that the compound is continuously released into the aqueous humor. Within another aspect of the present invention, methods are provided for treating proliferative diabetic retinopathy, comprising the step of administering-to a patient a therapeutically effective amount of a polynucleotide, polypeptide, antagonist and/or agonist to the eyes, such that the formation of blood vessels is inhibited.

[0688] Within particularly preferred embodiments of the invention, proliferative diabetic retinopathy may be treated by injection into the aqueous humor or the vitreous, in order to increase the local concentration of the polynucleotide, polypeptide, antagonist and/or agonist in the retina. Preferably, this treatment should be initiated prior to the acquisition of severe disease requiring photocoagulation.

[0689] Within another aspect of the present invention, methods are provided for treating retrolental fibroplasia, comprising the step of administering to a patient a therapeutically effective amount of a polynucleotide, polypeptide, antagonist and/or agonist to the eye, such that the formation of blood vessels is inhibited. The compound may be administered topically, via intravitreous injection and/or via intraocular implants.

[0690] Additionally, disorders which can be treated with the polynucleotides, polypeptides, agonists and/or agonists include, but are not limited to, hemangioma, arthritis, psoriasis, angiofibroma, atherosclerotic plaques, delayed wound healing, granulations, hemophilic joints, hypertrophic scars, nonunion fractures, Osler-Weber syndrome, pyogenic granuloma, scleroderma, trachoma, and vascular adhesions.

[0691] Moreover, disorders and/or states, which can be treated, prevented, diagnosed and/or prognosed with the polynucleotides, polypeptides, agonists and/or agonists of the invention include, but are not limited to, solid tumors, blood born tumors such as leukemias, tumor metastasis, Kaposi's sarcoma, benign tumors, for example hemangiomas, acoustic neuromas, neurofibromas, trachomas, and pyogenic granulomas, rheumatoid arthritis, psoriasis, ocular angiogenic diseases, for example, diabetic retinopathy, retinopathy of prematurity, macular degeneration, corneal graft rejection, neovascular glaucoma, retrolental fibroplasia, rubeosis, retinoblastoma, and uvietis, delayed wound healing, endometriosis, vascluogenesis, granulations, hypertrophic scars (keloids), nonunion fractures, scleroderma, trachoma, vascular adhesions, myocardial angiogenesis, coronary collaterals, cerebral collaterals, arterioyenous malformations, ischemic limb angiogenesis, Osler-Webber Syndrome, plaque neovascularization, telangiectasia, hemophiliac joints, angiofibroma fibromuscular dysplasia, wound granulation, Crohn's disease, atherosclerosis, birth control agent by preventing vascularization required for embryo implantation controlling menstruation, diseases that have angiogenesis as a pathologic consequence such as cat scratch disease (Rochele minalia quintosa), ulcers (Helicobacter pylori), Bartonellosis and bacillary angiomatosis.

[0692] In one aspect of the birth control method, an amount of the compound sufficient to block embryo implantation is administered before or after intercourse and fertilization have occurred, thus providing an effective method of birth control, possibly a “morning after” method. Polynucleotides, polypeptides, agonists and/or agonists may also be used in controlling menstruation or administered as either a peritoneal lavage fluid or for peritoneal implantation in the treatment of endometriosis.

[0693] Polynucleotides, polypeptides, agonists and/or agonists of the present invention may be incorporated into surgical sutures in order to prevent stitch granulomas.

[0694] Polynucleotides, polypeptides, agonists and/or agonists may be utilized in a wide variety of surgical procedures. For example, within one aspect of the present invention a compositions (in the form of, for example, a spray or film) may be utilized to coat or spray an area prior to removal of a tumor, in order to isolate normal surrounding tissues from malignant tissue, and/or to prevent the spread of disease to surrounding tissues. Within other aspects of the present invention, compositions (e.g., in the form of a spray) may be delivered via endoscopic procedures in order to coat tumors, or inhibit angiogenesis in a desired locale. Within yet other aspects of the present invention, surgical meshes, which have been coated with anti-angiogenic compositions of the present invention may be utilized in any procedure wherein a surgical mesh might be utilized. For example, within one embodiment of the invention a surgical mesh laden with an anti-angiogenic composition may be utilized during abdominal cancer resection surgery (e.g., subsequent to colon resection) in order to provide support to the structure, and to release an amount of the anti-angiogenic factor.

[0695] Within further aspects of the present invention, methods are provided for treating tumor excision sites, comprising administering a polynucleotide, polypeptide, agonist and/or agonist to the resection margins of a tumor subsequent to excision, such that the local recurrence of cancer and the formation of new blood vessels at the site is inhibited. Within one embodiment of the invention, the anti-angiogenic compound is administered directly to the tumor excision site (e.g., applied by swabbing, brushing or otherwise coating the resection margins of the tumor with the anti-angiogenic compound). Alternatively, the anti-angiogenic compounds may be incorporated into known surgical pastes prior to administration. Within particularly preferred embodiments of the invention, the anti-angiogenic compounds are applied after hepatic resections for malignancy, and after neurosurgical operations.

[0696] Within one aspect of the present invention, polynucleotides, polypeptides, agonists and/or agonists may be administered to the resection margin of a wide variety of tumors, including for example, breast, colon, brain and hepatic tumors. For example, within one embodiment of the invention, anti-angiogenic compounds may be administered to the site of a neurological tumor subsequent to excision, such that the formation of new blood vessels at the site are inhibited.

[0697] The polynucleotides, polypeptides, agonists and/or agonists of the present invention may also be administered along with other anti-angiogenic factors. Representative examples of other anti-angiogenic factors include: Anti-Invasive Factor, retinoic acid and derivatives thereof, paclitaxel, Suramin, Tissue Inhibitor of Metalloproteinase-1, Tissue Inhibitor of Metalloproteinase-2, Plasminogen Activator Inhibitor-1, Plasminogen Activator Inhibitor-2, and various forms of the lighter “d group” transition metals.

[0698] Lighter “d group” transition metals include, for example, vanadium, molybdenum, tungsten, titanium, niobium, and tantalum species. Such transition metal species may form transition metal complexes. Suitable complexes of the above-mentioned transition metal species include oxo transition metal complexes.

[0699] Representative examples of vanadium complexes include oxo vanadium complexes such as vanadate and vanadyl complexes. Suitable vanadate complexes include metavanadate and orthovanadate complexes such as, for example, ammonium metavanadate, sodium metavanadate, and sodium orthovanadate. Suitable vanadyl complexes include, for example, vanadyl acetylacetonate and vanadyl sulfate including vanadyl sulfate hydrates such as vanadyl sulfate mono- and trihydrates.

[0700] Representative examples of tungsten and molybdenum complexes also include oxo complexes. Suitable oxo tungsten complexes include tungstate and tungsten oxide complexes. Suitable tungstate complexes include ammonium tungstate, calcium tungstate, sodium tungstate dihydrate, and tungstic acid. Suitable tungsten oxides include tungsten (IV) oxide and tungsten (VI) oxide. Suitable oxo molybdenum complexes include molybdate, molybdenum oxide, and molybdenyl complexes. Suitable molybdate complexes include ammonium molybdate and its hydrates, sodium molybdate and its hydrates, and potassium molybdate and its hydrates. Suitable molybdenum oxides include molybdenum (VI) oxide, molybdenum (VI) oxide, and molybdic acid. Suitable molybdenyl complexes include, for example, molybdenyl acetylacetonate. Other suitable tungsten and molybdenum complexes include hydroxo derivatives derived from, for example, glycerol, tartaric acid, and sugars.

[0701] A wide variety of other anti-angiogenic factors may also be utilized within the context of the present invention. Representative examples include platelet factor 4; protamine sulphate; sulphated chitin derivatives (prepared from queen crab shells), (Murata et al., Cancer Res. 51:22-26 (1991)); Sulphated Polysaccharide Peptidoglycan Complex (SP-PG) (the function of this compound may be enhanced by the presence of steroids such as estrogen, and tamoxifen citrate); Staurosporine; modulators of matrix metabolism, including for example, proline analogs, cishydroxyproline, d,L-3,4-dehydroproline, Thiaproline, alpha,alpha-dipyridyl, aminopropionitrile fumarate; 4-propyl-5-(4-pyridinyl)-2(3H)-oxazolone; Methotrexate; Mitoxantrone; Heparin; Interferons; 2 Macroglobulin-serum; ChIMP-3 (Pavloff et al., J. Bio. Chem. 267:17321-17326 (1992)); Chymostatin (Tomkinson et al., Biochem J. 286:475-480 (1992)); Cyclodextrin Tetradecasulfate; Eponemycin; Camptothecin; Fumagillin (Ingber et al., Nature 348:555-557 (1-990)); Gold Sodium Thiomalate (“GST”; Matsubara and Ziff, J. Clin. Invest. 79:1440-1446 (1987)); anticollagenase-serum; alpha2-antiplasmin (Holmes et al., J. Biol. Chem. 262(4):1659-1664 (1987)); Bisantrene (National Cancer Institute); Lobenzarit disodium (N-(2)-carboxyphenyl-4-chloroanthronilic acid disodium or “CCA”; Takeuchi et al., Agents Actions 36:312-316, 1992); Thalidomide; Angostatic steroid; AGM-1470; carboxynaminolmidazole; and metalloproteinase inhibitors such as BB94.

[0702] Musculoskeletal System Disorders

[0703] Polynucleotides, polypeptides, antibodies, and/or agonists or antagonists of the present invention, may be used to treat, prevent, diagnose, and/or prognose disorders of the musculoskeletal system, including but not limited to, disorders of the bone, joints, ligaments, tendons, bursa, muscle, and/or neoplasms and cancers associated with musculoskeletal tissue.

[0704] Diseases or disorders of the bone include, but are not limited to, Albers-Schonberg disease, bowlegs, heel spurs, Kohler's bone disease, knock-knees, Legg-Calve-Perthes disease, Marfan's syndrome, mucopolysaccharidoses, Osgood-Schlatter disease, osteochondroses, osteochondrodysplasia, osteomyelitis, osteopetroses, osteoporosis (postmenopausal, senile, and juvenile), Paget's disease, Scheuermann's disease, scoliosis, Sever's disease, and patellofemoral stress syndrome.

[0705] Joint diseases or disorders include, but are not limited to, ankylosing spondylitis, Behcet's syndrome, CREST syndrome, Ehlers-Danlos syndrome, infectious arthritis, discoid lupus erythematosus, systemic lupus erythematosus, Lyme disease, osteoarthritis, psoriatic arthritis, relapsing polychondrites, Reiter's syndrome, rheumatoid arthritis (adult and juvenile), scleroderma, and Still's disease.

[0706] Diseases or disorders affecting ligaments, tendons, or bursa include, but are not limited to, ankle sprain, bursitis, posterior Achilles tendon bursitis (Haglund's deformity), anterior Achilles tendon bursitis (Albert's disease), tendinitis, tenosynovitis, poplieus tendinitis, Achilles tendinitis, medial or lateral epicondylitis, rotator cuff tendinitis, spasmodic torticollis, and fibromyalgia syndrome.

[0707] Muscle diseases or disorders include, but are not limited to, Becker's muscular dystrophy, Duchenne's muscular dystrophy, Landouzy-Dejerine muscular dystrophy, Leyden-Möbius muscular dystrophy, Erb's muscular dystrophy, Charcot's joints, dermatomyositis, gout, pseudogout, glycogen storage diseases, Pompe's disease, mitochondrial myopathy, periodic paralysis, polymyalgia rheumatica, polymyositis, Steinert's disease, Thomsen's disease, anterolateral and posteromedial shin splints, posterior femoral muscle strain, and fibromyositis.

[0708] Musculoskeletal tissue may also develop cancers and/or neoplasms that include, but are not limited to, osteochondroma, benign chondroma, chondroblastoma, chondromyxoid fibroma, osteoid osteoma, giant cell tumor, multiple myeloma, osteosarcoma, fibrosarcoma, malignant fibrous histiocytoma, chondrosarcoma, Ewing's tumor, and malignant lymphoma of bone.

[0709] Neural Activity and Neurological Diseases

[0710] The polynucleotides, polypeptides and agonists or antagonists of the invention may be used for the diagnosis and/or treatment of diseases, disorders, damage or injury of the brain and/or nervous system. Nervous system disorders that can be treated with the compositions of the invention (e.g., polypeptides, polynucleotides, and/or agonists or antagonists), include, but are not limited to, nervous system injuries, and diseases or disorders which result in either a disconnection of axons, a diminution or degeneration of neurons, or demyelination. Nervous system lesions which may be treated in a patient (including human and non-human mammalian patients) according to the methods of the invention, include but are not limited to, the following lesions of either the central (including spinal cord, brain) or peripheral nervous systems: (1) ischemic lesions, in which a lack of oxygen in a portion of the nervous system results in neuronal injury or death, including cerebral infarction or ischemia, or spinal cord infarction or ischemia; (2) traumatic lesions, including lesions caused by physical injury or associated with surgery, for example, lesions which sever a portion of the nervous system, or compression injuries; (3) malignant lesions, in which a portion of the nervous system is destroyed or injured by malignant tissue which is either a nervous system associated malignancy or a malignancy derived from non-nervous system tissue; (4) infectious lesions, in which a portion of the nervous system is destroyed or injured as a result of infection, for example, by an abscess or associated with infection by human immunodeficiency virus, herpes zoster, or herpes simplex virus or with Lyme disease, tuberculosis, or syphilis; (5) degenerative lesions, in which a portion of the nervous system is destroyed or injured as a result of a degenerative process including but not limited to, degeneration associated with Parkinson's disease, Alzheimer's disease, Huntington's chorea, or amyotrophic lateral sclerosis (ALS); (6) lesions associated with nutritional diseases or disorders, in which a portion of the nervous system is destroyed or injured by a nutritional disorder or disorder of metabolism including, but not limited to, vitamin B12 deficiency, folic acid deficiency, Wernicke disease, tobacco-alcohol amblyopia, Marchiafava-Bignami disease (primary degeneration of the corpus callosum), and alcoholic cerebellar degeneration; (7) neurological lesions associated with systemic diseases including, but not limited to, diabetes (diabetic neuropathy, Bell's palsy), systemic lupus erythematosus, carcinoma, or sarcoidosis; (8) lesions caused by toxic substances including alcohol, lead, or particular neurotoxins; and (9) demyelinated lesions in which a portion of the nervous system is destroyed or injured by a demyelinating disease including, but not limited to, multiple sclerosis, human immunodeficiency virus-associated myelopathy, transverse myelopathy or various etiologies, progressive multifocal leukoencephalopathy, and central pontine myelinolysis.

[0711] In one embodiment, the polypeptides, polynucleotides, or agonists or antagonists of the invention are used to protect neural cells from the damaging effects of hypoxia. In a further preferred embodiment, the polypeptides, polynucleotides, or agonists or antagonists of the invention are used to protect neural cells from the damaging effects of cerebral hypoxia. According to this embodiment, the compositions of the invention are used to treat or prevent neural cell injury associated with cerebral hypoxia. In one non-exclusive aspect of this embodiment, the polypeptides, polynucleotides, or agonists or antagonists of the invention, are used to treat or prevent neural cell injury associated with cerebral ischemia. In another non-exclusive aspect of this embodiment, the polypeptides, polynucleotides, or agonists or antagonists of the invention are used to treat or prevent neural cell injury associated with cerebral infarction.

[0712] In another preferred embodiment, the polypeptides, polynucleotides, or agonists or antagonists of the invention are used to treat or prevent neural cell injury associated with a stroke. In a specific embodiment, the polypeptides, polynucleotides, or agonists or antagonists of the invention are used to treat or prevent cerebral neural cell injury associated with a stroke.

[0713] In another preferred embodiment, the polypeptides, polynucleotides, or agonists or antagonists of the invention are used to treat or prevent neural cell injury associated with a heart attack. In a specific embodiment, the polypeptides, polynucleotides, or agonists or antagonists of the invention are used to treat or prevent cerebral neural cell injury associated with a heart attack.

[0714] The compositions of the invention which are useful for treating or preventing a nervous system disorder may be selected by testing for biological activity in promoting the survival or differentiation of neurons. For example, and not by way of limitation, compositions of the invention which elicit any of the following effects may be useful according to the invention: (1) increased survival time of neurons in culture either in the presence or absence of hypoxia or hypoxic conditions; (2) increased sprouting of neurons in culture or in vivo; (3) increased production of a neuron-associated molecule in culture or in vivo, e.g., choline acetyltransferase or acetylcholinesterase with respect to motor neurons; or (4) decreased symptoms of neuron dysfunction in vivo. Such effects may be measured by any method known in the art. In preferred, non-limiting embodiments, increased survival of neurons may routinely be measured using a method set forth herein or otherwise known in the art, such as, for example, in Zhang et al., Proc Natl Acad Sci USA 97:3637-42 (2000) or in Arakawa et al., J. Neurosci., 10:3507-15 (1990); increased sprouting of neurons may be detected by methods known in the art, such as, for example, the methods set forth in Pestronk et al., Exp. Neurol., 70:65-82 (1980), or Brown et al., Ann. Rev. Neurosci., 4:17-42 (1981); increased production of neuron-associated molecules may be measured by bioassay, enzymatic assay, antibody binding, Northern blot assay, etc., using techniques known in the art and depending on the molecule to be measured; and motor neuron dysfunction may be measured by assessing the physical manifestation of motor neuron disorder, e.g., weakness, motor neuron conduction velocity, or functional disability.

[0715] In specific embodiments, motor neuron disorders that may be treated according to the invention include, but are not limited to, disorders such as infarction, infection, exposure to toxin, trauma, surgical damage, degenerative disease or malignancy that may affect motor neurons as well as other components of the nervous system, as well as disorders that selectively affect neurons such as amyotrophic lateral sclerosis, and including, but not limited to, progressive spinal muscular atrophy, progressive bulbar palsy, primary lateral sclerosis, infantile and juvenile muscular atrophy, progressive bulbar paralysis of childhood (Fazio-Londe syndrome), poliomyelitis and the post polio syndrome, and Hereditary Motorsensory Neuropathy (Charcot-Marie-Tooth Disease).

[0716] Further, polypeptides or polynucleotides of the invention may play a role in neuronal survival; synapse formation; conductance; neural differentiation, etc. Thus, compositions of the invention (including polynucleotides, polypeptides, and agonists or antagonists) may be used to diagnose and/or treat or prevent diseases or disorders associated with these roles, including, but not limited to, learning and/or cognition disorders. The compositions of the invention may also be useful in the treatment or prevention of neurodegenerative disease states and/or behavioural disorders. Such neurodegenerative disease states and/or behavioral disorders include, but are not limited to, Alzheimer's Disease, Parkinson's Disease, Huntington's Disease, Tourette Syndrome, schizophrenia, mania, dementia, paranoia, obsessive compulsive disorder, panic disorder, learning disabilities, ALS, psychoses, autism, and altered behaviors, including disorders in feeding, sleep patterns, balance, and perception. In addition, compositions of the invention may also play a role in the treatment, prevention and/or detection of developmental disorders associated with the developing embryo, or sexually-linked disorders.

[0717] Additionally, polypeptides, polynucleotides and/or agonists or antagonists of the invention, may be useful in protecting neural cells from diseases, damage, disorders, or injury, associated with cerebrovascular disorders including, but not limited to, carotid artery diseases (e.g., carotid artery thrombosis, carotid stenosis, or Moyamoya Disease), cerebral amyloid angiopathy, cerebral aneurysm, cerebral anoxia, cerebral arteriosclerosis, cerebral arterioyenous malformations, cerebral artery diseases, cerebral embolism and thrombosis (e.g., carotid artery thrombosis, sinus thrombosis, or Wallenberg's Syndrome), cerebral hemorrhage (e.g., epidural or subdural hematoma, or subarachnoid hemorrhage), cerebral infarction, cerebral ischemia (e.g., transient cerebral ischemia, Subclavian Steal Syndrome, or vertebrobasilar insufficiency), vascular dementia (e.g., multi-infarct), leukomalacia, periventricular, and vascular headache (e.g., cluster headache or migraines).

[0718] In accordance with yet a further aspect of the present invention, there is provided a process for utilizing polynucleotides or polypeptides, as well as agonists or antagonists of the present invention, for therapeutic purposes, for example, to stimulate neurological cell proliferation and/or differentiation. Therefore, polynucleotides, polypeptides, agonists and/or antagonists of the invention may be used to treat and/or detect neurologic diseases. Moreover, polynucleotides or polypeptides, or agonists or antagonists of the invention, can be used as a marker or detector of a particular nervous system disease or disorder.

[0719] Examples of neurologic diseases which can be treated or detected with polynucleotides, polypeptides, agonists, and/or antagonists of the present invention include brain diseases, such as metabolic brain diseases which includes phenylketonuria such as maternal phenylketonuria, pyruvate carboxylase deficiency, pyruvate dehydrogenase complex deficiency, Wernicke's Encephalopathy, brain edema, brain neoplasms such as cerebellar neoplasms which include infratentorial neoplasms, cerebral ventricle neoplasms such as choroid plexus neoplasms, hypothalamic neoplasms, supratentorial neoplasms, canavan disease, cerebellar diseases such as cerebellar ataxia which include spinocerebellar degeneration such as ataxia telangiectasia, cerebellar dyssynergia, Friederich's Ataxia, Machado-Joseph Disease, olivopontocerebellar atrophy, cerebellar neoplasms such as infratentorial neoplasms, diffuse cerebral sclerosis such as encephalitis periaxialis, globoid cell leukodystrophy, metachromatic leukodystrophy and subacute sclerosing panencephalitis.

[0720] Additional neurologic diseases which can be treated or detected with polynucleotides, polypeptides, agonists, and/or antagonists of the present invention include cerebrovascular disorders (such as carotid artery diseases which-include carotid artery thrombosis, carotid stenosis and Moyamoya Disease), cerebral amyloid angiopathy, cerebral aneurysm, cerebral anoxia, cerebral arteriosclerosis, cerebral arterioyenous malformations, cerebral artery diseases, cerebral embolism and thrombosis such as carotid artery thrombosis, sinus thrombosis and Wallenberg's Syndrome, cerebral hemorrhage such as epidural hematoma, subdural hematoma and subarachnoid hemorrhage, cerebral infarction, cerebral ischemia such as transient cerebral ischemia, Subclavian Steal Syndrome and vertebrobasilar insufficiency, vascular dementia such as multi-infarct dementia, periventricular leukomalacia, vascular headache such as cluster headache and migraine.

[0721] Additional neurologic diseases which can be treated or detected with polynucleotides, polypeptides, agonists, and/or antagonists of the present invention include dementia such as AIDS Dementia Complex, presenile dementia such as Alzheimer's Disease and Creutzfeldt-Jakob Syndrome, senile dementia such as Alzheimer's Disease and progressive supranuclear palsy, vascular dementia such as multi-infarct dementia, encephalitis which include encephalitis periaxialis, viral encephalitis such as epidemic encephalitis, Japanese Encephalitis, St. Louis Encephalitis, tick-borne encephalitis and West Nile Fever, acute disseminated encephalomyelitis, meningoencephalitis such as uveomeningoencephalitic syndrome, Postencephalitic Parkinson Disease and subacute sclerosing panencephalitis, encephalomalacia such as periventricular leukomalacia, epilepsy such as generalized epilepsy which includes infantile spasms, absence epilepsy, myoclonic epilepsy which includes MERRF Syndrome, tonic-clonic epilepsy, partial epilepsy such as complex partial epilepsy, frontal lobe epilepsy and temporal lobe epilepsy, post-traumatic epilepsy, status epilepticus such as Epilepsia Partialis Continua, and Hallervorden-Spatz Syndrome.

[0722] Additional neurologic diseases which can be treated or detected with polynucleotides, polypeptides, agonists, and/or antagonists of the present invention include hydrocephalus such as Dandy-Walker Syndrome and normal pressure hydrocephalus, hypothalamic diseases such as hypothalamic neoplasms, cerebral malaria, narcolepsy which includes cataplexy, bulbar poliomyelitis, cerebri pseudotumor, Rett Syndrome, Reye's Syndrome, thalamic diseases, cerebral toxoplasmosis, intracranial tuberculoma and Zellweger Syndrome, central nervous system infections such as AIDS Dementia Complex, Brain Abscess, subdural empyema, encephalomyelitis such as Equine Encephalomyelitis, Venezuelan Equine Encephalomyelitis, Necrotizing Hemorrhagic Encephalomyelitis, Visna, and cerebral malaria.

[0723] Additional neurologic diseases which can be treated or detected with polynucleotides, polypeptides, agonists, and/or antagonists of the present invention include meningitis such as arachnoiditis, aseptic meningtitis such as viral meningtitis which includes lymphocytic choriomeningitis, Bacterial meningtitis which includes Haemophilus Meningtitis, Listeria Meningtitis, Meningococcal Meningtitis such as Waterhouse-Friderichsen Syndrome, Pneumococcal Meningtitis and meningeal tuberculosis, fungal meningitis such as Cryptococcal Meningtitis, subdural effusion, meningoencephalitis such as uvemeningoencephalitic syndrome, myelitis such as transverse myelitis, neurosyphilis such as tabes dorsalis, poliomyelitis which includes bulbar poliomyelitis and postpoliomyelitis syndrome, prion diseases (such as Creutzfeldt-Jakob Syndrome, Bovine Spongiform Encephalopathy, Gerstmann-Straussler Syndrome, Kuru, Scrapie), and cerebral toxoplasmosis.

[0724] Additional neurologic diseases which can be treated or detected with polynucleotides, polypeptides, agonists, and/or antagonists of the present invention include central nervous system neoplasms such as brain neoplasms that include cerebellar neoplasms such as infratentorial neoplasms, cerebral ventricle neoplasms such as choroid plexus neoplasms, hypothalamic neoplasms and supratentorial neoplasms, meningeal neoplasms, spinal cord neoplasms which include epidural neoplasms, demyelinating diseases such as Canavan Diseases, diffuse cerebral sceloris which includes adrenoleukodystrophy, encephalitis periaxialis, globoid cell leukodystrophy, diffuse cerebral sclerosis such as metachromatic leukodystrophy, allergic encephalomyelitis, necrotizing hemorrhagic encephalomyelitis, progressive multifocal leukoencephalopathy, multiple sclerosis, central pontine myelinolysis, transverse myelitis, neuromyelitis optica, Scrapie, Swayback, Chronic Fatigue Syndrome, Visna, High Pressure Nervous Syndrome, Meningism, spinal cord diseases such as amyotonia congenita, amyotrophic lateral sclerosis, spinal muscular atrophy such as Werdnig-Hoffmann Disease, spinal cord compression, spinal cord neoplasms such as epidural neoplasms, syringomyelia, Tabes Dorsalis, Stiff-Man Syndrome, mental retardation such as Angelman Syndrome, Cri-du-Chat Syndrome, De Lange's Syndrome, Down Syndrome, Gangliosidoses such as gangliosidoses G(M1), Sandhoff Disease, Tay-Sachs Disease, Hartnup Disease, homocystinuria, Laurence-Moon-Biedl Syndrome, Lesch-Nyhan Syndrome, Maple Syrup Urine Disease, mucolipidosis such as fucosidosis, neuronal ceroid-lipofuscinosis, oculocerebrorenal syndrome, phenylketonuria such as maternal phenylketonuria, Prader-Willi Syndrome, Rett Syndrome, Rubinstein-Taybi Syndrome, Tuberous Sclerosis, WAGR Syndrome, nervous system abnormalities such as holoprosencephaly, neural tube defects such as anencephaly which includes hydrangencephaly, Arnold-Chairi Deformity, encephalocele, meningocele, meningomyelocele, spinal dysraphism such as spina bifida cystica and spina bifida occulta.

[0725] Additional neurologic diseases which can be treated or detected with polynucleotides, polypeptides, agonists, and/or antagonists of the present invention include hereditary motor and sensory neuropathies which include Charcot-Marie Disease, Hereditary optic atrophy, Refsum's Disease, hereditary spastic paraplegia, Werdnig-Hoffmann Disease, Hereditary Sensory and Autonomic Neuropathies such as Congenital Analgesia and Familial Dysautonomia, Neurologic manifestations (such as agnosia that include Gerstmann's Syndrome, Amnesia such as retrograde amnesia, apraxia, neurogenic bladder, cataplexy, communicative disorders such as hearing disorders that includes deafness, partial hearing loss, loudness recruitment and tinnitus, language disorders such as aphasia which include agraphia, anomia, broca aphasia, and Wernicke Aphasia, Dyslexia such as Acquired Dyslexia, language development disorders, speech disorders such as aphasia which includes anomia, broca aphasia and Wernicke Aphasia, articulation disorders, communicative disorders such as speech disorders which include dysarthria, echolalia, mutism and stuttering, voice disorders such as aphonia and hoarseness, decerebrate state, delirium, fasciculation, hallucinations, meningism, movement disorders such as angelman syndrome, ataxia, athetosis, chorea, dystonia, hypokinesia, muscle hypotonia, myoclonus, tic, torticollis and tremor, muscle hypertonia such as muscle rigidity such as stiff-man syndrome, muscle spasticity, paralysis such as facial paralysis which includes Herpes Zoster Oticus, Gastroparesis, Hemiplegia, ophthalmoplegia such as diplopia, Duane's Syndrome, Horner's Syndrome, Chronic progressive external ophthalmoplegia such as Kearns Syndrome, Bulbar Paralysis, Tropical Spastic Paraparesis, Paraplegia such as Brown-Sequard Syndrome, quadriplegia, respiratory paralysis and vocal cord paralysis, paresis, phantom limb, taste disorders such as ageusia and dysgeusia, vision disorders such as amblyopia, blindness, color vision defects, diplopia, hemianopsia, scotoma and subnormal vision, sleep disorders such as hypersomnia which includes Kleine-Levin Syndrome, insomnia, and somnambulism, spasm such as trismus, unconsciousness such as coma, persistent vegetative state and syncope and vertigo, neuromuscular diseases such as amyotonia congenita, amyotrophic lateral sclerosis, Lambert-Eaton Myasthenic Syndrome, motor neuron disease, muscular atrophy such as spinal muscular atrophy, Charcot-Marie Disease and Werdnig-Hoffmann Disease, Postpoliomyelitis Syndrome, Muscular Dystrophy, Myasthenia Gravis, Myotonia Atrophica, Myotonia Confenita, Nemaline Myopathy, Familial Periodic Paralysis, Multiplex Paramyloclonus, Tropical Spastic Paraparesis and Stiff-Man Syndrome, peripheral nervous system diseases such as acrodynia, amyloid neuropathies, autonomic nervous system diseases such as Adie's Syndrome, Barre-Lieou Syndrome, Familial Dysautonomia, Horner's Syndrome, Reflex Sympathetic Dystrophy and Shy-Drager Syndrome, Cranial Nerve Diseases such as Acoustic Nerve Diseases such as Acoustic Neuroma which includes Neurofibromatosis 2, Facial Nerve Diseases such as Facial Neuralgia,Melkersson-Rosenthal Syndrome, ocular motility disorders which includes amblyopia, nystagmus, oculomotor nerve paralysis, ophthalmoplegia such as Duane's Syndrome, Horner's Syndrome, Chronic Progressive External Ophthalmoplegia which includes Kearns Syndrome, Strabismus such as Esotropia and Exotropia, Oculomotor Nerve Paralysis, Optic Nerve Diseases such as Optic Atrophy which includes Hereditary Optic Atrophy, Optic Disk Drusen, Optic Neuritis such as Neuromyelitis Optica, Papilledema, Trigeminal Neuralgia, Vocal Cord Paralysis, Demyelinating Diseases such as Neuromyelitis Optica and Swayback, and Diabetic neuropathies such as diabetic foot.

[0726] Additional neurologic diseases which can be treated or detected with polynucleotides, polypeptides, agonists, and/or antagonists of the present invention include nerve compression syndromes such as carpal tunnel syndrome, tarsal tunnel syndrome, thoracic outlet syndrome such as cervical rib syndrome, ulnar nerve compression syndrome, neuralgia such as causalgia, cervico-brachial neuralgia, facial neuralgia and trigeminal neuralgia, neuritis such as experimental allergic neuritis, optic neuritis, polyneuritis, polyradiculoneuritis and radiculities such as polyradiculitis, hereditary motor and sensory neuropathies such as Charcot-Marie Disease, Hereditary Optic Atrophy, Refsum's Disease, Hereditary Spastic Paraplegia and Werdnig-Hoffmann Disease, Hereditary Sensory and Autonomic Neuropathies which include Congenital Analgesia and Familial Dysautonomia, POEMS Syndrome, Sciatica, Gustatory Sweating and Tetany).

[0727] Endocrine Disorders

[0728] Polynucleotides or polypeptides, or agonists or antagonists of the present invention, may be used to treat, prevent, diagnose, and/or prognose disorders and/or diseases related to hormone imbalance, and/or disorders or diseases of the endocrine system.

[0729] Hormones secreted by the glands of the endocrine system control physical growth, sexual function, metabolism, and other functions. Disorders may be classified in two ways: disturbances in the production of hormones, and the inability of tissues to respond to hormones. The etiology of these hormone imbalance or endocrine system diseases, disorders or conditions may be genetic, somatic, such as cancer and some autoimmune diseases, acquired (e.g., by chemotherapy, injury or toxins), or infectious. Moreover, polynucleotides, polypeptides, antibodies, and/or agonists or antagonists of the present invention can be used as a marker or detector of a particular disease or disorder related to the endocrine system and/or hormone imbalance.

[0730] Endocrine system and/or hormone imbalance and/or diseases encompass disorders of uterine motility including, but not limited to: complications with pregnancy and labor (e.g., pre-term labor, post-term pregnancy, spontaneous abortion, and slow or stopped labor); and disorders and/or diseases of the menstrual cycle (e.g., dysmenorrhea and endometriosis).

[0731] Endocrine system and/or hormone imbalance disorders and/or diseases include disorders and/or diseases of the pancreas, such as, for example, diabetes mellitus, diabetes insipidus, congenital pancreatic agenesis, pheochromocytoma—islet cell tumor syndrome; disorders and/or diseases of the adrenal glands such as, for example, Addison's Disease, corticosteroid deficiency, virilizing disease, hirsutism, Cushing's Syndrome, hyperaldosteronism, pheochromocytoma; disorders and/or diseases of the pituitary gland, such as, for example, hyperpituitarism, hypopituitarism, pituitary dwarfism, pituitary adenoma, panhypopituitarism, acromegaly, gigantism; disorders and/or diseases of the thyroid, including but not limited to, hyperthyroidism, hypothyroidism, Plummer's disease, Graves' disease (toxic diffuse goiter), toxic nodular goiter, thyroiditis (Hashimoto's thyroiditis, subacute granulomatous thyroiditis, and silent lymphocytic thyroiditis), Pendred's syndrome, myxedema, cretinism, thyrotoxicosis, thyroid hormone coupling defect, thymic aplasia, Hurthle cell tumours of the thyroid, thyroid cancer, thyroid carcinoma, Medullary thyroid carcinoma; disorders and/or diseases of the parathyroid, such as, for example, hyperparathyroidism, hypoparathyroidism; disorders and/or diseases of the hypothalamus.

[0732] In addition, endocrine system and/or hormone imbalance disorders and/or diseases may also include disorders and/or diseases of the testes or ovaries, including cancer. Other disorders and/or diseases of the testes or ovaries further include, for example, ovarian cancer, polycystic ovary syndrome, Klinefelter's syndrome, vanishing testes syndrome (bilateral anorchia), congenital absence of Leydig's cells, cryptorchidism, Noonan's syndrome, myotonic dystrophy, capillary haemangioma of the testis (benign), neoplasias of the testis and neo-testis.

[0733] Moreover, endocrine system and/or hormone imbalance disorders and/or diseases may also include disorders and/or diseases such as, for example, polyglandular deficiency syndromes, pheochromocytoma, neuroblastoma, multiple Endocrine neoplasia, and disorders and/or cancers of endocrine tissues.

[0734] In another embodiment, a polypeptide of the invention, or polynucleotides, antibodies, agonists, or antagonists corresponding to that polypeptide, may be used to diagnose, prognose, prevent, and/or treat endocrine diseases and/or disorders associated with the tissue(s) in which the polypeptide of the invention is expressed, including one, two, three, four, five, or more tissues disclosed in Table 1A, column 7 (Tissue Distribution Library Code).

[0735] Gastrointestinal Disorders

[0736] Polynucleotides or polypeptides, or agonists or antagonists of the present invention, may be used to treat, prevent, diagnose, and/or prognose gastrointestinal disorders, including inflammatory diseases and/or conditions, infections, cancers (e.g., intestinal neoplasms (carcinoid tumor of the small intestine, non-Hodgkin's lymphoma of the small intestine, small bowl lymphoma)), and ulcers, such as peptic ulcers.

[0737] Gastrointestinal disorders include dysphagia, odynophagia, inflammation of the esophagus, peptic esophagitis, gastric reflux, submucosal fibrosis and stricturing, Mallory-Weiss lesions, leiomyomas, lipomas, epidermal cancers, adeoncarcinomas, gastric retention disorders, gastroenteritis, gastric atrophy, gastric/stomach cancers, polyps of the stomach, autoimmune disorders such as pernicious anemia, pyloric stenosis, gastritis (bacterial, viral, eosinophilic, stress-induced, chronic erosive, atrophic, plasma cell, and Menetrier's), and peritoneal diseases (e.g., chyloperioneum, hemoperitoneum, mesenteric cyst, mesenteric lymphadenitis, mesenteric vascular occlusion, panniculitis, neoplasms, peritonitis, pneumoperitoneum, bubphrenic abscess).

[0738] Gastrointestinal disorders also include disorders associated with the small intestine, such as malabsorption syndromes, distension, irritable bowel syndrome, sugar intolerance, celiac disease, duodenal ulcers, duodenitis, tropical sprue, Whipple's disease, intestinal lymphangiectasia, Crohn's disease, appendicitis, obstructions of the ileum, Meckel's diverticulum, multiple diverticula, failure of cornplete rotation of the small and large intestine, lymphoma, and bacterial and parasitic diseases (such as Traveler's diarrhea, typhoid and paratyphoid, cholera, infection by Roundworms (Ascariasis lumbricoides), Hookworms (Ancylostoma duodenale), Threadworms (Enterobius vermicularis), Tapeworms (Taenia saginata, Echinococcus granulosus, Diphyllobothrium spp., and T. solium).

[0739] Liver diseases and/or disorders include intrahepatic cholestasis (alagille syndrome, biliary liver cirrhosis), fatty liver (alcoholic fatty liver, reye syndrome), hepatic vein thrombosis, hepatolentricular degeneration, hepatomegaly, hepatopulmonary syndrome, hepatorenal syndrome, portal hypertension (esophageal and gastric varices), liver abscess (amebic liver abscess), liver cirrhosis (alcoholic, biliary and experimental), alcoholic liver diseases (fatty liver, hepatitis, cirrhosis), parasitic (hepatic echinococcosis, fascioliasis, amebic liver abscess), jaundice (hemolytic, hepatocellular, and cholestatic), cholestasis, portal hypertension, liver enlargement, ascites, hepatitis (alcoholic hepatitis, animal hepatitis, chronic hepatitis (autoimmune, hepatitis B, hepatitis C, hepatitis D, drug induced), toxic hepatitis, viral human hepatitis (hepatitis A, hepatitis B, hepatitis C, hepatitis D, hepatitis E), Wilson's disease, granulomatous hepatitis, secondary biliary cirrhosis, hepatic encephalopathy, portal hypertension, varices, hepatic encephalopathy, primary biliary cirrhosis, primary sclerosing cholangitis, hepatocellular adenoma, hemangiomas, bile stones, liver failure (hepatic encephalopathy, acute liver failure), and liver neoplasms (angiomyolipoma, calcified liver metastases, cystic liver metastases, epithelial tumors, fibrolamellar hepatocarcinoma, focal nodular hyperplasia, hepatic adenoma, hepatobiliary cystadenoma, hepatoblastoma, hepatocellular carcinoma, hepatoma, liver cancer, liver hemangioendothelioma, mesenchymal hamartoma, mesenchymal tumors of liver, nodular regenerative hyperplasia, benign liver tumors (Hepatic cysts [Simple cysts, Polycystic liver disease, Hepatobiliary cystadenoma, Choledochal cyst], Mesenchymal tumors [Mesenchymal hamartoma, Infantile hemangioendothelioma, Hemangioma, Peliosis hepatis, Lipomas, Inflammatory pseudotumor, Miscellaneous], Epithelial tumors [Bile duct epithelium (Bile duct hamartoma, Bile duct adenoma), Hepatocyte (Adenoma, Focal nodular hyperplasia, Nodular regenerative hyperplasia)], malignant liver tumors [hepatocellular, hepatoblastoma, hepatocellular carcinoma, cholangiocellular, cholangiocarcinoma, cystadenocarcinoma, tumors of blood vessels, angiosarcoma, Karposi's sarcoma, hemangioendothelioma, other tumors, embryonal sarcoma, fibrosarcoma, leiomyosarcoma, rhabdomyosarcoma, carcinosarcoma, teratoma, carcinoid, squamous carcinoma, primary lymphoma]), peliosis hepatis, erythrohepatic porphyria, hepatic porphyria (acute intermittent porphyria, porphyria cutanea tarda), Zellweger syndrome).

[0740] Pancreatic diseases and/or disorders include acute pancreatitis, chronic pancreatitis (acute necrotizing pancreatitis, alcoholic pancreatitis), neoplasms (adenocarcinoma of the pancreas, cystadenocarcinoma, insulinoma, gastrinoma, and glucagonoma, cystic neoplasms, islet-cell tumors, pancreoblastoma), and other pancreatic diseases (e.g., cystic fibrosis, cyst (pancreatic pseudocyst, pancreatic fistula, insufficiency)).

[0741] Gallbladder diseases include gallstones (cholelithiasis and choledocholithiasis), postcholecystectomy syndrome, diverticulosis of the gallbladder, acute cholecystitis, chronic cholecystitis, bile duct tumors, and mucocele.

[0742] Diseases and/or disorders of the large intestine include antibiotic-associated colitis, diverticulitis, ulcerative colitis, acquired megacolon, abscesses, fungal and bacterial infections, anorectal disorders (e.g., fissures, hemorrhoids), colonic diseases (colitis, colonic neoplasms [colon cancer, adenomatous colon polyps (e.g., villous adenoma), colon carcinoma, colorectal cancer], colonic diverticulitis, colonic diverticulosis, megacolon [Hirschsprung disease, toxic megacolon]; sigmoid diseases [proctocolitis, sigmoin neoplasms]), constipation, Crohn's disease, diarrhea (infantile diarrhea, dysentery), duodenal diseases (duodenal neoplasms, duodenal obstruction, duodenal ulcer, duodenitis), enteritis (enterocolitis), HIV enteropathy, ileal diseases (ileal neoplasms, ileitis), immunoproliferative small intestinal disease, inflammatory bowel disease (ulcerative colitis, Crohn's disease), intestinal atresia, parasitic diseases (anisakiasis, balantidiasis, blastocystis infections, cryptosporidiosis, dientamoebiasis, amebic dysentery, giardiasis), intestinal fistula (rectal fistula), intestinal neoplasms (cecal neoplasms, colonic neoplasms, duodenal neoplasms, ileal neoplasms, intestinal polyps, jejunal neoplasms, rectal neoplasms), intestinal obstruction (afferent loop syndrome, duodenal obstruction, impacted feces, intestinal pseudo-obstruction [cecal volvulus], intussusception), intestinal perforation, intestinal polyps (colonic polyps, gardner syndrome, peutz-jeghers syndrome), jejunal diseases (jejunal neoplasms), malabsorption syndromes (blind loop syndrome, celiac disease, lactose intolerance, short bowl syndrome, tropical sprue, whipple's disease), mesenteric vascular occlusion, pneumatosis cystoides intestinalis, protein-losing enteropathies (intestinal lymphagiectasis), rectal diseases (anus diseases, fecal incontinence, hemorrhoids, proctitis, rectal fistula, rectal prolapse, rectocele), peptic ulcer (duodenal ulcer, peptic esophagitis, hemorrhage, perforation, stomach ulcer, Zollinger-Ellison syndrome), postgastrectomy syndromes (dumping syndrome), stomach diseases (e.g., achlorhydria, duodenogastric reflux (bile reflux), gastric antral vascular ectasia, gastric fistula, gastric outlet obstruction, gastritis (atrophic or hypertrophic), gastroparesis, stomach dilatation, stomach diverticulum, stomach neoplasms (gastric cancer, gastric polyps, gastric adenocarcinoma, hyperplastic gastric polyp), stomach rupture, stomach ulcer, stomach volvulus), tuberculosis, visceroptosis, vomiting (e.g., hematemesis, hyperemesis gravidarum, postoperative nausea and vomiting) and hemorrhagic colitis.

[0743] Further diseases and/or disorders of the gastrointestinal system include biliary tract diseases, such as, gastroschisis, fistula (e.g., biliary fistula, esophageal fistula, gastric fistula, intestinal fistula, pancreatic fistula), neoplasms (e.g., biliary tract neoplasms, esophageal neoplasms, such as adenocarcinoma of the esophagus, esophageal squamous cell carcinoma, gastrointestinal neoplasms, pancreatic neoplasms, such as adenocarcinoma of the pancreas, mucinous cystic neoplasm of the pancreas, pancreatic cystic neoplasms, pancreatoblastoma, and peritoneal neoplasms), esophageal disease (e.g., bullous diseases, candidiasis, glycogenic acanthosis, ulceration, barrett esophagus varices, atresia, cyst, diverticulum (e.g., Zenker's diverticulum), fistula (e.g., tracheoesophageal fistula), motility disorders (e.g., CREST syndrome, deglutition disorders, achalasia, spasm, gastroesophageal reflux), neoplasms, perforation (e.g., Boerhaave syndrome, Mallory-Weiss syndrome), stenosis, esophagitis, diaphragmatic hernia (e.g., hiatal hernia); gastrointestinal diseases, such as, gastroenteritis (e.g., cholera morbus, norwalk virus infection), hemorrhage (e.g., hematemesis, melena, peptic ulcer hemorrhage), stomach neoplasms (gastric cancer, gastric polyps, gastric adenocarcinoma, stomach cancer)), hernia (e.g., congenital diaphragmatic hernia, femoral hernia, inguinal hernia, obturator hernia, umbilical hernia, ventral hernia), and intestinal diseases (e.g., cecal diseases (appendicitis, cecal neoplasms)).

[0744] Developmental and Inherited Disorders

[0745] Polynuceotides or polypeptides, or agonists or antagonists of the present invention may be used to treat, prevent, diagnose, and/or prognose diseases associated with mixed fetal tissues, including, but not limited to, developmental and inherited disorders or defects of the nervous system, musculoskelelal system, execretory system, cardiovascular system, hematopoietic system, gastrointestinal system, reproductive system, and respiratory system. Compositions of the present invention may also be used to treat, prevent, diagnose, and/or prognose developmental and inherited disorders or defects associated with, but not limited to, skin, hair, visual, and auditory tissues, metabolism. Additionally, the compositions of the invention may be useful in the diagnosis, treatment, and/or prevention of disorders or diseases associated with, but not limited to, chromosomal or genetic abnormalities and hyperproliferation or neoplasia.

[0746] Disorders or defects of the nervous system associated with developmental or inherited abnormalities that may be diagnosed, treated, and/or prevented with the compostions of the invention include, but are not limited to, adrenoleukodystrophy, agenesis of corpus callosum, Alexander disease, anencephaly, Angelman syndrome, Amold-Chiari deformity, Batten disease, Canavan disease, cephalic disorders, Charcot-Marie-Tooth disease, encephalocele, Friedreich's ataxia, Gaucher's disease, Gorlin syndrome, Hallervorden-Spatz disease, hereditary spastic paraplegia, Huntington disease, hydranencephaly, hydrocephalus, Joubert syndrome, Lesch-Nyhan syndrome, leukodystrophy, Menkes disease, microcephaly, Niemann-Pick Type C1, neurofibromatosis, porencephaly, progeria, proteus syndrome, Refsum disease, spina bifida, Sturge-Weber syndrome, Tay-Sachs disease, tuberous sclerosis, and von Hippel-Lindau disease.

[0747] Developmental and inherited disorders resulting in disorders or defects of the musculoskeletal system that may be diagnosed, treated, and/or prevented with the compositions of the invention include, but are not limited to, achondroplasia, atlanto-occipital fusion, arthrog,ryposis mulitplex congenita, autosomal recessive muscular dystrophy, Becker's muscular dystrophy, cerebral palsy, choanal atresia, cleft lip, cleft palate, clubfoot, congenital amputation, congenital dislocation of the hip, congenital torticollis, congenital scoliosis, dopa-repsonsive dystonia, Duchenne muscular dystrophy, early-onset generalized dystonia, femoral torsion, Gorlin syndrome, hypophosphatasia, Klippel-Feil syndrome, knee dislocation, myoclonic dystonia, myotonic dystrophy, nail-patella syndrome, osteogenesis imperfecta, paroxysmal dystonia, progeria, prune-belly syndrome, rapid-onset dystonia parkinsonism, scolosis, syndactyly, Treacher Collins' syndrome, velocardiofacial syndrome, and X-linked dystonia-parkinsonism.

[0748] Developmental or hereditary disorders or defects of the excretory system that may be diagnosed, treated, and/or prevented with the compositions of the invention include, but are not limited to, Alport's syndrome, Bartter's syndrome, bladder diverticula, bladder exstrophy, cystinuria, epispadias, Fanconi's syndrome, Hartnup disease, horseshoe kidney, hypospadias, kidney agenesis, kidney ectopia, kidney malrotation, Liddle's syndrome, medullary cystic disease, medullary sponge, multicystic kidney, kidney polycystic kidney disease, nail-patella syndrome, Potter's syndrome, urinary tract flow obstruction, vitamin D-resistant rickets, and Wilm's tumor.

[0749] Cardiovascular disorders or defects of developmental or hereditary origin that may be diagnosed, treated, and/or prevented with the compositions of the inventtion include, but are not limited to, aortic valve stenosis, atrial septal defects, artioventricular (A-V) canal defect, bicuspid aortic valve, coarctation or the aorta, dextrocardia, Ebstein's anomaly, Eisenmenger's complex, hypoplastic left heart syndrome, Marfan syndrome, patent ductus arteriosus, progeria, pulmonary atresia, pulmonary valve stenosis, subaortic stenosis, tetralogy of fallot, total anomalous pulmonary venous (P-V) connection, transposition of the great arteries, tricuspid atresia, truncus arteriosus, ventricular septal defects. Developmental or inherited disorders resulting in disorders involving the hematopoietic system that may be diagnosed, treated, and/or prevented with the compositions of the invention include, but not limited to, Bemard-Soulier syndrome, Chediak-Higashi syndrome, hemophilia, Hermansky-Pudlak syndrome, sickle cell anemia, storage pool disease, thromboxane A2 dysfunction, thrombasthenia, and von Willebrand's disease.

[0750] The compositions of the invention may also be used to diagnose, treat, and/or prevent developmental and inherited disorders resulting in disorders or defects of the gastrointestinal system, including, but not limited to, anal atresia, biliary atresia, esophageal atresia, diaphragmatic hernia, Hirschsprung's disease, Meckel's diverticulum, oligohydramnios, omphalocele, polyhydramnios, porphyria, situs inversus viscera. Developmental or inherited disorders resulting in metabolic disorders that may be diagnosed, treated, and/or prevented with the compositions of the invention include, but are not limited to, alpha-i antitrypsin deficiency, cystic fibrosis, hemochromatosis, lysosomal storage disease, phenylketonuria, Wilson's disease, and Zellweger syndrome.

[0751] Disorders of the reproductive system that are developmentally or hereditary related that may also be diagnosed, treated, and/or prevented with the compositions of the invention include, but are not limited to, androgen insensitivity syndrome, ambiguous genitalia, autosomal sex reversal, congenital adreneal hyperplasia, gonadoblastoma, ovarian germ cell cancer, pseudohermphroditism, true hermaphroditism, undescended testis, XX male syndrome, and XY female type gonadal dysgenesis. The compositions of the invention may also be used to diagnose, treat, and/or prevent developmental or inherited respiratory defects including, but not limited to, askin tumor, azygos lobe, congenital diaphragmatic hernia, congenital lobar emphysema, cystic adenomatoid malformation, lobar emphysema, hyaline membrane disease, and pectus excavatum.

[0752] Developmental or inherited disorders may also result from chromosomal or genetic aberration that may be diagnosed, treated, and/or prevented with the compositions of the invention including, but not limited to, 4p-syndrome, cri du chat syndrome, Digeorge syndrome, Down's syndrome, Edward's syndrome, fragile X syndrome, Klinefelter's syndrome, Patau's syndrome, Prader-Willi syndrome, progeria, Turner's syndrome, triple X syndrome, and XYY syndrome. Other developmental disorders that can be diagnosed, treated, and/or prevented with the compositions of the invention, include, but are not limited to, fetal alcohol syndrome, and can be caused by environmental factors surrounding the developing fetus.

[0753] The compositions of the invention may further be able to be used to diagnose, treat, and/or prevent errors in development or a genetic disposition that may result in hyperproliferative disorders or neoplasms, including, but not limited to, acute childhood lymphoblastic leukemia, askin tumor, Beckwith-Wiedemann syndrome, childhood acute myeloid leukemia, childhood brain stem glioma, childhood cerebellar astrocytoma, childhood extracranial germ cell tumors childhood (primary), gonadoblastoma, hepatocellular cancer, childhood Hodgkin's disease, childhood Hodgkin's lymphoma, childhood hypothalamic and visual pathway glioma, childhood (primary) liver cancer, childhood lymphoblastic leukemia, childhood medulloblastoma, childhood non-Hodgkin's lymphoma, childhood pineal and supratentorial primitive neuroectodermal tumors, childhood primary liver cancer, childhood rhabdomyosarcoma, childhood soft tissue sarcoma, Gorlin syndrome, familial multiple endrocrine neoplasia type I, neuroblastoma, ovarian germ cell cancer, pheochromocytoma, retinoblastoma, and Wilm's tumor.

[0754] Polypeptides may be administered using any method known in the art, including, but not limited to, direct needle injection at the delivery site, intravenous injection, topical administration, catheter infusion, biolistic injectors, particle accelerators, gelfoam sponge depots, other commercially available depot materials, osmotic pumps, oral or suppositorial solid pharmaceutical formulations, decanting or topical applications during surgery, aerosol delivery. Such methods are known in the art. Polypeptides may be administered as part of a Therapeutic, described in more detail below. Methods of delivering polynucleotides are described in more detail herein.

[0755] Diseases at the Cellular Level

[0756] Diseases associated with increased cell survival or the inhibition of apoptosis that could be treated, prevented, diagnosed and/or prognosed using polynucleotides or polypeptides, as well as antagonists or agonists of the present invention, include cancers (such as follicular lymphomas, carcinomas with p53 mutations, and hormone-dependent tumors, including, but not limited to colon cancer, cardiac tumors, pancreatic cancer, melanoma, retinoblastoma, glioblastoma, lung cancer, intestinal cancer, testicular cancer, stomach cancer, neuroblastoma, myxoma, myoma, lymphoma, endothelioma, osteoblastoma, osteoclastoma, osteosarcoma, chondrosarcoma, adenoma, breast cancer, prostate cancer, Kaposi's sarcoma and ovarian cancer); autoimmune disorders (such as, multiple sclerosis, Srögren's syndrome, Hashimoto's thyroiditis, biliary cirrhosis, Behcet's disease, Crohn's disease, polymyositis, systemic lupus erythematosus and immune-related glomerulonephritis and rheumatoid arthritis) and viral infections (such as herpes viruses, pox viruses and adenoviruses), inflammation, graft v. host disease, acute graft rejection, and chronic graft rejection.

[0757] In preferred embodiments, polynucleotides, polypeptides, and/or antagonists of the invention are used to inhibit growth, progression, and/or metastasis of cancers, in particular those [listed above] involving breast and ovarian tissues.

[0758] Additional diseases or conditions associated with increased cell survival that could be treated or detected by polynucleotides or polypeptides, or agonists or antagonists of the present invention include, but are not limited to, progression, and/or metastases of malignancies and related disorders such as leukemia (including acute leukemias (e.g., acute lymphocytic leukemia, acute myelocytic leukemia (including myeloblastic, promyelocytic, myelomonocytic, monocytic, and erythroleukemia)) and chronic leukemias (e.g., chronic myelocytic (granulocytic) leukemia and chronic lymphocytic leukemia)), polycythemia vera, lymphomas (e.g., Hodgkin's disease and non-Hodgkin's disease), multiple myeloma, Waldenstrom's macroglobulinemia, heavy chain disease, and solid tumors including, but not limited to, sarcomas and carcinomas such as fibrosarcoma, myxosarcoma, liposarcoma, chondrosarcoma, osteogenic sarcoma, chordoma, angiosarcoma, endotheliosarcoma, lymphangiosarcoma, lymphangioendotheliosarcoma, synovioma, mesothelioma, Ewing's tumor, leiomyosarcoma, rhabdomyosarcoma, colon carcinoma, pancreatic cancer, breast cancer, ovarian cancer, prostate cancer, squamous cell carcinoma, basal cell carcinoma, adenocarcinoma, sweat gland carcinoma, sebaceous gland carcinoma, papillary carcinoma, papillary adenocarcinomas, cystadenocarcinoma, medullary carcinoma, bronchogenic carcinoma, renal cell carcinoma, hepatoma, bile duct carcinoma, choriocarcinoma, seminoma, embryonal carcinoma, Wilm's tumor, cervical cancer, testicular tumor, lung carcinoma, small cell lung carcinoma, bladder carcinoma, epithelial carcinoma, glioma, astrocytoma, medulloblastoma, craniopharyngioma, ependymoma, pinealoma, hemangioblastoma, acoustic neuroma, oligodendroglioma, menangioma, melanoma, neuroblastoma, and retinoblastoma.

[0759] Diseases associated with increased apoptosis that could be treated, prevented, diagnosted, and/or prognosed using polynucleotides or polypeptides, as well as agonists or antagonists of the present invention, include, but are not limited to, AIDS; neurodegenerative disorders (such as Alzheimer's disease, Parkinson's disease, Amyotrophic lateral sclerosis, Retinitis pigmentosa, Cerebellar degeneration and brain tumor or prior associated disease); autoimmune disorders (such as, multiple sclerosis, Sjogren's syndrome, Hashimoto's thyroiditis, biliary cirrhosis, Behcet's disease, Crohn's disease, polymyositis, systemic lupus erythematosus and immune-related glomerulonephritis and rheumatoid arthritis) myelodysplastic syndromes (such as aplastic anemia), graft v. host disease, ischemic injury (such as that caused by myocardial infarction, stroke and reperfusion injury), liver injury (e.g., hepatitis related liver injury, ischemia/reperfusion injury, cholestosis (bile duct injury) and liver cancer); toxin-induced liver disease (such as that caused by alcohol), septic shock, cachexia and anorexia.

[0760] Wound Healing and Epithelial Cell Proliferation

[0761] In accordance with yet a further aspect of the present invention, there is provided a process for utilizing polynucleotides or polypeptides, as well as agonists or antagonists of the present invention, for therapeutic purposes, for example, to stimulate epithelial cell proliferation and basal keratinocytes for the purpose of wound healing, and to stimulate hair follicle production and healing of dermal wounds. Polynucleotides or polypeptides, as well as agonists or antagonists of the present invention, may be clinically useful in stimulating wound healing including surgical wounds, excisional wounds, deep wounds involving damage of the dermis and epidernis, eye tissue wounds, dental tissue wounds, oral cavity wounds, diabetic ulcers, dermal ulcers, cubitus ulcers, arterial ulcers, venous stasis ulcers, bums resulting from heat exposure or chemicals, and other abnormal wound healing conditions such as uremia, malnutrition, vitamin deficiencies and complications associated with systemic treatment with steroids, radiation therapy and antineoplastic drugs and antimetabolites. Polynucleotides or polypeptides, as well as agqnists or antagonists of the present invention, could be used to promote dermal reestablishment subsequent to dermal loss.

[0762] Polynucleotides or polypeptides, as well as agonists or antagonists of the present invention, could be used to increase the adherence of skin grafts to a wound bed and to stimulate re-epithelialization from the wound bed. The following are types of grafts that polynucleotides or polypeptides, agonists or antagonists of the present invention, could be used to increase adherence to a wound bed: autografts, artificial skin, allografts, autodermic graft, autoepdermic grafts, avacular grafts, Blair-Brown grafts, bone graft, brephoplastic grafts, cutis graft, delayed graft, dermic graft, epidermic graft, fascia graft, full thickness graft, heterologous graft, xenograft, homologous graft, hyperplastic graft, lamellar graft, mesh graft, mucosal graft, Ollier-Thiersch graft, omenpal graft, patch graft, pedicle graft, penetrating graft, split skin graft, thick split graft. Polynucleotides or polypeptides, as well as agonists or antagonists of the present invention, can be used to promote skin strength and to improve the appearance of aged skin.

[0763] It is believed that polynucleotides or polypeptides, as well as agonists or antagonists of the present invention, will also produce changes in hepatocyte proliferation, and epithelial cell proliferation in the lung, breast, pancreas, stomach, small intestine, and large intestine. Polynucleotides or polypeptides, as well as agonists or antagonists of the present invention, could promote proliferation of epithelial cells such as sebocytes, hair follicles, hepatocytes, type II pneumocytes, mucin-producing goblet cells, and other epithelial cells and their progenitors contained within the skin, lung, liver, and gastrointestinal tract. Polynucleotides or polypeptides, agonists or antagonists of the present invention, may promote proliferation of endothelial cells, keratinocytes, and basal keratinocytes.

[0764] Polynucleotides or polypeptides, as well as agonists or antagonists of the present invention, could also be used to reduce the side effects of gut toxicity that result from radiation, chemotherapy treatments or viral infections. Polynucleotides or polypeptides, as well as agonists or antagonists of the present invention, may have a cytoprotective effect on the small intestine mucosa. Polynucleotides or polypeptides, as well as agonists or antagonists of the present invention, may also stimulate healing of mucositis (mouth ulcers) that result from chemotherapy and viral infections.

[0765] Polynucleotides or polypeptides, as well as agonists or antagonists of the present invention, could further be used in full regeneration of skin in full and partial thickness skin defects, including burns, (i.e., repopulation of hair follicles, sweat glands, and sebaceous glands), treatment of other skin defects such as psoriasis. Polynucleotides or polypeptides, as well as agonists or antagonists of the present invention, could be used to treat epidermolysis bullosa, a defect in adherence of the epidermis to the underlying dermis which results in frequent, open and painful blisters by accelerating reepithelialization of these lesions. Polynucleotides or polypeptides, as well as agonists or antagonists of the present invention, could also be used to treat gastric and doudenal ulcers and help heal by scar formation of the mucosal lining and regeneration of glandular mucosa and duodenal mucosal lining more rapidly. Inflammatory bowel diseases, such as Crohn's disease and ulcerative colitis, are diseases, which result in destruction of the mucosal surface of the small or large intestine, respectively. Thus, polynucleotides or polypeptides, as well as agonists or antagonists of the present invention, could be used to promote the resurfacing of the mucosal surface to aid more rapid healing and to prevent progression of inflammatory bowel disease. Treatment with polynucleotides or polypeptides, agonists or antagonists of the present invention, is expected to have a significant effect on the production of mucus throughout the gastrointestinal tract and could be used to protect the intestinal mucosa from injurious substances that are ingested or following surgery. Polynucleotides or polypeptides, as well as agonists or antagonists of the present invention, could be used to treat diseases associate with the under expression.

[0766] Moreover, polynucleotides or polypeptides, as well as agonists or antagonists of the present invention, could be used to prevent and heal damage to the lungs due to various pathological states. Polynucleotides or polypeptides, as well as agonists or antagonists of the present invention, could stimulate proliferation and differentiation and promote the repair of alveoli and brochiolar epithelium to prevent or treat acute or chronic lung damage. For example, emphysema, which results in the progressive loss of aveoli, and inhalation injuries, i.e., resulting from smoke inhalation and burns, that cause necrosis of the bronchiolar epithelium and alveoli could be effectively treated using polynucleotides or polypeptides, agonists or antagonists of the present invention. Also, polynucleotides or polypeptides, as well as agonists or antagonists of the present invention, could be used to stimulate the proliferation of and differentiation of type II pneumocytes, which may help treat or prevent disease such as hyaline membrane diseases, such as infant respiratory distress syndrome and bronchopulmonary displasia, in premature infants.

[0767] Polynucleotides or polypeptides, as well as agonists or antagonists of the present invention, could stimulate the proliferation and differentiation of hepatocytes and, thus, could be used to alleviate or treat liver diseases and pathologies such as fulminant liver failure caused by cirrhosis, liver damage caused by viral hepatitis and toxic substances (i.e., acetaminophen, carbon tetraholoride and other hepatotoxins known in the art).

[0768] In addition, polynucleotides or polypeptides, as well as agonists or antagonists of the present invention, could be used treat or prevent the onset of diabetes mellitus. In patients with newly diagnosed Types I and II diabetes, where some islet cell function remains, polynucleotides or polypeptides, as well as agonists or antagonists of the present invention, could be used to maintain the islet function so as to alleviate, delay or prevent permanent manifestation of the disease. Also, polynucleotides or polypeptides, as well as agonists or antagonists of the present invention, could be used as an auxiliary in islet cell transplantation to improve or promote islet cell function.

[0769] Infectious Disease

[0770] Polynucleotides or polypeptides, as well as agonists or antagonists of the present invention can be used to treat or detect infectious agents. For example, by increasing the immune response, particularly increasing the proliferation and differentiation of B and/or T cells, infectious diseases may be treated. The immune response may be increased by either enhancing an existing immune response, or by initiating a new immune response. Alternatively, polynucleotides or polypeptides, as well as agonists or antagonists of the present invention may also directly inhibit the infectious agent, without necessarily eliciting an immune response.

[0771] Viruses are one example of an infectious agent that can cause disease or symptoms that can be treated or detected by a polynucleotide or polypeptide and/or agonist or antagonist of the present invention. Examples of viruses, include, but are not limited to Examples of viruses, include, but are not limited to the following DNA and RNA viruses and viral families: Arbovirus, Adenoviridae, Arenaviridae, Arterivirus, B imaviridae, Bunyaviridae, Caliciviridae, Circoviridae, Coronaviridae, Dengue, EBV, HIV, Flaviviridae, Hepadnaviridae (Hepatitis), Herpesviridae (such as, Cytomegalovirus, Herpes Simplex, Herpes Zoster), Mononegavirus (e.g., Paramyxoviridae, Morbillivirus, Rhabdoviridae), Orthomyxoviridae (e.g., Influenza A, Influenza B, and parainfluenza), Papiloma virus, Papovaviridae, Parvoviridae, Picornaviridae, Poxyiridae (such as Smallpox or Vaccinia), Reoviridae (e.g., Rotavirus), Retroviridae (HTLV-I, HTLV-II, Lentivirus), and Togaviridae (e.g., Rubivirus). Viruses falling within these families can cause a variety of diseases or symptoms, including, but not limited to: arthritis, bronchiollitis, respiratory syncytial virus, encephalitis, eye infections (e.g., conjunctivitis, keratitis), chronic fatigue syndrome, hepatitis (A, B, C, E, Chronic Active, Delta), Japanese B encephalitis, Junin, Chikungunya, Rift Valley fever, yellow fever, meningitis, opportunistic infections (e.g., AIDS), pneumonia, Burkitt's Lymphoma, chickenpox, hemorrhagic fever, Measles, Mumps, Parainfluenza, Rabies, the common cold, Polio, leukemia, Rubella, sexually transmitted diseases, skin diseases (e.g., Kaposi's, warts), and viremia. polynucleotides or polypeptides, or agonists or antagonists of the invention, can be used to treat or detect any of these symptoms or diseases. In specific embodiments, polynucleotides, polypeptides, or agonists or antagonists of the invention are used to treat: meningitis, Dengue, EBV, and/or hepatitis (e.g., hepatitis B). In an additional specific embodiment polynucleotides, polypeptides, or agonists or antagonists of the invention are used to treat patients nonresponsive to one or more other commercially available hepatitis vaccines. In a further specific embodiment polynucleotides, polypeptides, or agonists or antagonists of the invention are used to treat AIDS.

[0772] Similarly, bacterial and fungal agents that can cause disease or symptoms and that can be treated or detected by a polynucleotide or polypeptide and/or agonist or antagonist of the present invention include, but not limited to, the following Gram-Negative and Gram-positive bacteria, bacterial families, and fungi: Actinomyces (e.g., Norcardia), Acinetobacter, Cryptococcus neoformans, Aspergillus, Bacillaceae (e.g., Bacillus anthrasis), Bacteroides (e.g., Bacteroides fragilis), Blastomycosis, Bordetella, Borrelia (e.g., Borrelia burgdorferi), Brucella, Candidia, Campylobacter, Chlamydia, Clostridium (e.g., Clostridium botulinum, Clostridium dificile, Clostridium perfringens, Clostridium tetani), Coccidioides, Corynebacterium (e.g., Corynebacterium diptheriae), Cryptococcus, Dermatocycoses, E. coli (e.g., Enterotoxigenic E. coli and Enterohemorrhagic E. coli), Enterobacter (e.g. Enterobacter aerogenes), Enterobacteriaceae (Klebsiella, Salmonella (e.g., Salmonella typhi, Salmonella enteritidis, Salmonella typhi), Serratia, Yersinia, Shigella), Erysipelothrix, Haemophilus (e.g., Haemophilus influenza type B), Helicobacter, Legionella (e.g., Legionella pneumophila), Leptospira, Listeria (e.g., Listeria monocytogenes), Mycoplasma, Mycobacterium (e.g., Mycobacterium leprae and Mycobacterium tuberculosis), Vibrio (e.g., Vibrio cholerae), Neisseriaceae (e.g., Neisseria gonorrhea, Neisseria meningitidis), Pasteurellacea, Proteus, Pseudomonas (e.g., Pseudomonas aeruginosa), Rickettsiaceae, Spirochetes (e.g., Treponema spp., Leptospira spp., Borrelia spp.), Shigella spp., Staphylococcus (e.g., Staphylococcus aureus), Meningiococcus, Pneumococcus and Streptococcus (e.g., Streptococcus pneumoniae and Groups A, B, and C Streptococci), and Ureaplasmas. These bacterial, parasitic, and fungal families can cause diseases or symptoms, including, but not limited to: antibiotic-resistant infections, bacteremia, endocarditis, septicemia, eye infections (e.g., conjunctivitis), uveitis, tuberculosis, gingivitis, bacterial diarrhea, opportunistic infections (e.g., AIDS related infections), paronychia, prosthesis-related infections, dental caries, Reiter's Disease, respiratory tract infections, such as Whooping Cough or Empyema, sepsis, Lyme Disease, Cat-Scratch Disease, dysentery, paratyphoid fever, food poisoning, Legionella disease, chronic and acute inflammation, erythema, yeast infections, typhoid, pneumonia, gonorrhea, meningitis (e.g., mengitis types A and B), chlamydia, syphillis, diphtheria, leprosy, brucellosis, peptic ulcers, anthrax, spontaneous abortions, birth defects, pneumonia, lung infections, ear infections, deafness, blindness, lethargy, malaise, vomiting, chronic diarrhea, Crohn's disease, colitis, vaginosis, sterility, pelvic inflammatory diseases, candidiasis, paratuberculosis, tuberculosis, lupus, botulism, gangrene, tetanus, impetigo, Rheumatic Fever, Scarlet Fever, sexually transmitted diseases, skin diseases (e.g., cellulitis, dermatocycoses), toxemia, urinary tract infections, wound infections, noscomial infections. Polynucleotides or polypeptides, agonists or antagonists of the invention, can be used to treat or detect any of these symptoms or diseases. In specific embodiments, polynucleotides, polypeptides, agonists or antagonists of the invention are used to treat: tetanus, diptheria, botulism, and/or meningitis type B.

[0773] Moreover, parasitic agents causing disease or symptoms that can be treated, prevented, and/or diagnosed by a polynucleotide or polypeptide and/or agonist or antagonist of the present invention include, but not limited to, the following families or class: Amebiasis, Babesiosis, Coccidiosis, Cryptosporidiosis, Dientamoebiasis, Dourine, Ectoparasitic, Giardias, Helminthiasis, Leishmaniasis, Schistisoma, Theileriasis, Toxoplasmosis, Trypanosomiasis, and Trichomonas and Sporozoans (e.g., Plasmodium virax, Plasmodium falciparium, Plasmodium malariae and Plasmodium ovale). These parasites can cause a variety of diseases or symptoms, including, but not limited to: Scabies, Trombiculiasis, eye infections, intestinal disease (e.g., dysentery, giardiasis), liver disease, lung disease, opportunistic infections (e.g., AIDS related), malaria, pregnancy complications, and toxoplasmosis. polynucleotides or polypeptides, or agonists or antagonists of the invention, can be used to treat, prevent, and/or diagnose any of these symptoms or diseases. In specific embodiments, polynucleotides, polypeptides, or agonists or antagonists of the invention are used to treat, prevent, and/or diagnose malaria.

[0774] Polynucleotides or polypeptides, as well as agonists or antagonists of the present invention of the present invention could either be by administering an effective amount of a polypeptide to the patient, or by removing cells from the patient, supplying the cells with a polynucleotide of the present invention, and returning the engineered cells to the patient (ex vivo therapy). Moreover, the polypeptide or polynucleotide of the present invention can be used as an antigen in a vaccine to raise an immune response against infectious disease.

[0775] Regeneration

[0776] Polynucleotides or polypeptides, as well as agonists or antagonists of the present invention can be used to differentiate, proliferate, and attract cells, leading to the regeneration of tissues. (See, Science 276:59-87 (1997).) The regeneration of tissues could be used to repair, replace, or protect tissue damaged by congenital defects, trauma (wounds, burns, incisions, or ulcers), age, disease (e.g. osteoporosis, osteocarthritis, periodontal disease, liver failure), surgery, including cosmetic plastic surgery, fibrosis, reperfusion injury, or systemic cytokine damage.

[0777] Tissues that could be regenerated using the present invention include organs (e.g., pancreas, liver, intestine, kidney, skin, endothelium), muscle (smooth, skeletal or cardiac), vasculature (including vascular and lymphatics), nervous, hematopoietic, and skeletal (bone, cartilage, tendon, and ligament) tissue. Preferably, regeneration occurs without or decreased scarring. Regeneration also may include angiogenesis.

[0778] Moreover, polynucleotides or polypeptides, as well as agonists or antagonists of the present invention, may increase regeneration of tissues difficult to heal. For example, increased tendon/ligament regeneration would quicken recovery time after damage. Polynucleotides or polypeptides, as well as agonists or antagonists of the present invention could also be used prophylactically in an effort to avoid damage. Specific diseases that could be treated include of tendinitis, carpal tunnel syndrome, and other tendon or ligament defects. A further example of tissue regeneration of non-healing wounds includes pressure ulcers, ulcers associated with vascular insufficiency, surgical, and traumatic wounds.

[0779] Similarly, nerve and brain tissue could also be regenerated by using polynucleotides or polypeptides, as well as agonists or antagonists of the present invention, to proliferate and differentiate nerve cells. Diseases that could be treated using this method include central and peripheral nervous system diseases, neuropathies, or mechanical and traumatic disorders (e.g., spinal cord disorders, head trauma, cerebrovascular disease, and stoke). Specifically, diseases associated with peripheral nerve injuries, peripheral neuropathy (e.g., resulting from chemotherapy or other medical therapies), localized neuropathies, and central nervous system diseases (e.g., Alzheimer's disease, Parkinson's disease, Huntington's disease, amyotrophic lateral sclerosis, and Shy-Drager syndrome), could all be treated using the polynucleotides or polypeptides, as well as agonists or antagonists of the present invention.

[0780] Chemotaxis

[0781] Polynucleotides or polypeptides, as well as agonists or antagonists of the present invention may have chemotaxis activity. A chemotaxic molecule attracts or mobilizes cells (e.g., monocytes, fibroblasts, neutrophils, T-cells, mast cells, eosinophils, epithelial and/or endothelial cells) to a particular site in the body, such as inflammation, infection, or site of hyperproliferation. The mobilized cells can then fight off and/or heal the particular trauma or abnormality.

[0782] Polynucleotides or polypeptides, as well as agonists or antagonists of the present invention may increase chemotaxic activity of particular cells. These chemotactic molecules can then be used to treat inflammation, infection, hyperproliferative disorders, or any immune system disorder by increasing the number of cells targeted to a particular location in the body. For example, chemotaxic molecules can be used to treat wounds and other trauma to tissues by attracting immune cells to the injured location. Chemotactic molecules of the present invention can also attract fibroblasts, which can be used to treat wounds.

[0783] It is also contemplated that polynucleotides or polypeptides, as well as agonists or antagonists of the present invention may inhibit chemotactic activity. These molecules could also be used to treat disorders. Thus, polynucleotides or polypeptides, as well as agonists or antagonists of the present invention could be used as an inhibitor of chemotaxis.

[0784] Binding Activity

[0785] A polypeptide of the present invention may be used to screen for molecules that bind to the polypeptide or for molecules to which the polypeptide binds. The binding of the polypeptide and the molecule may activate (agonist), increase, inhibit (antagonist), or decrease activity of the polypeptide or the molecule bound. Examples of such molecules include antibodies, oligonucleotides, proteins (e.g., receptors), or small molecules.

[0786] Preferably, the molecule is closely related to the natural ligand of the polypeptide, e.g., a fragment of the ligand, or a natural substrate, a ligand, a structural or functional mimetic. (See, Coligan et al., Current Protocols in Immunology 1(2):Chapter 5 (1991).) Similarly, the molecule can be closely related to the natural receptor to which the polypeptide binds, or at least, a fragment of the receptor capable of being bound by the polypeptide (e.g., active site). In either case, the molecule can be rationally designed using known techniques.

[0787] Preferably, the screening for these molecules involves producing appropriate cells which express the polypeptide. Preferred cells include cells from mammals, yeast, Drosophila, or E. coli. Cells expressing the polypeptide (or cell membrane containing the expressed polypeptide) are then preferably contacted with a test compound potentially containing the molecule to observe binding, stimulation, or inhibition of activity of either the polypeptide or the molecule.

[0788] The assay may simply test binding of a candidate compound to the polypeptide, wherein binding is detected by a label, or in an assay involving competition with a labeled competitor. Further, the assay may test whether the candidate compound results in a signal generated by binding to the polypeptide.

[0789] Alternatively, the assay can be carried out using cell-free preparations, polypeptide/molecule affixed to a solid support, chemical libraries, or natural product mixtures. The assay may also simply comprise the steps of mixing a candidate compound with a solution containing a polypeptide, measuring polypeptide/molecule activity or binding, and comparing the polypeptide/molecule activity or binding to a standard.

[0790] Preferably, an ELISA assay can measure polypeptide level or activity in a sample (e.g., biological sample) using a monoclonal or polyclonal antibody. The antibody can measure polypeptide level or activity by either binding, directly or indirectly, to the polypeptide or by competing with the polypeptide for a substrate.

[0791] Additionally, the receptor to which the polypeptide of the present invention binds can be identified by numerous methods known to those of skill in the art, for example, ligand panning and FACS sorting (Coligan, et al., Current Protocols in Immun., 1(2), Chapter 5, (1991)). For example, expression cloning is employed wherein polyadenylated RNA is prepared from a cell responsive to the polypeptides, for example, NIH3T3 cells which are known to contain multiple receptors for the FGF family proteins, and SC-3 cells, and a cDNA library created from this RNA is divided into pools and used to transfect COS cells or other cells that are not responsive to the polypeptides. Transfected cells which are grown on glass slides are exposed to the polypeptide of the present invention, after they have been labeled. The polypeptides can be labeled by a variety of means including iodination or inclusion of a recognition site for a site-specific protein kinase.

[0792] Following fixation and incubation, the slides are subjected to auto-radiographic analysis. Positive pools are identified and sub-pools are prepared and re-transfected using an iterative sub-pooling and re-screening process, eventually yielding a single clones that encodes the putative receptor.

[0793] As an alternative approach for receptor identification, the labeled polypeptides can be photoaffinity linked with cell membrane or extract preparations that express the receptor molecule. Cross-linked material is resolved by PAGE analysis and exposed to X-ray film. The labeled complex containing the receptors of the polypeptides can be excised, resolved into peptide fragments, and subjected to protein microsequencing. The amino acid sequence obtained from microsequencing would be used to design a set of degenerate oligonucleotide probes to screen a cDNA library to identify the genes encoding the putative receptors.

[0794] Moreover, the techniques of gene-shuffling, motif-shuffling, exon-shuffling, and/or codon-shuffling (collectively referred to as “DNA shuffling”) may be employed to modulate the activities of the polypeptide of the present invention thereby effectively generating agonists and antagonists of the polypeptide of the present invention. See generally, U.S. Pat. Nos. 5,605,793, 5,811,238, 5,830,721, 5,834,252, and 5,837,458, and Patten, P. A., et al., Curr. Opinion Biotechnol. 8:724-33 (1997); Harayama, S. Trends Biotechnol. 16(2):76-82 (1998); Hansson L. O., et al., J. Mol. Biol. 287:265-76 (1999); and Lorenzo, M. M. and Blasco, R. Biotechniques 24(2):308-13 (1998); each of these patents and publications are hereby incorporated by reference). In one embodiment, alteration of polynucleotides and corresponding polypeptides may be achieved by DNA shuffling. DNA shuffling involves the assembly of two or more DNA segments into a desired molecule by homologous, or site-specific, recombination. In another embodiment, polynucleotides and corresponding polypeptides may be altered by being subjected to random mutagenesis by error-prone PCR, random nucleotide insertion or other methods prior to recombination. In another embodiment, one or more components, motifs, sections, parts, domains, fragments, etc., of the polypeptide of the present invention may be recombined with one or more components, motifs, sections, parts, domains, fragments, etc. of one or more heterologous molecules. In preferred embodiments, the heterologous molecules are family members. In further preferred embodiments, the heterologous molecule is a growth factor such as, for example, platelet-derived growth factor (PDGF), insulin-like growth factor (IGF-I), transforming growth factor (TGF)-alpha, epidermal growth factor (EGF), fibroblast growth factor (FGF), TGF-beta, bone morphogenetic protein (BMP)-2, BMP-4, BMP-5, BMP-6, BMP-7, activins A and B, decapentaplegic(dpp), 60A, OP-2, dorsalin, growth differentiation factors (GDFs), nodal, MIS, inhibin-alpha, TGF-beta1, TGF-beta2, TGF-beta3, TGF-beta5, and glial-derived neurotrophic factor (GDNF).

[0795] Other preferred fragments are biologically active fragments of the polypeptide of the present invention. Biologically active fragments are those exhibiting activity similar, but not necessarily identical, to an activity of the polypeptide of the present invention. The biological activity of the fragments may include an improved desired activity, or a decreased undesirable activity.

[0796] Additionally, this invention provides a method of screening compounds to identify those which modulate the action of the polypeptide of the present invention. An example of such an assay comprises combining a mammalian fibroblast cell, the polypeptide of the present invention, the compound to be screened and ³[H] thymidine under cell culture conditions where the fibroblast cell would normally proliferate. A control assay may be performed in the absence of the compound to be screened and compared to the amount of fibroblast proliferation in the presence of the compound to determine if the compound stimulates proliferation by determining the uptake of ³[H] thymidine in each case. The amount of fibroblast cell proliferation is measured by liquid scintillation chromatography which measures the incorporation of ³[H] thymidine. Both agonist and antagonist compounds may be identified by this procedure.

[0797] In another method, a mammalian cell or membrane preparation expressing a receptor for a polypeptide of the present invention is incubated with a labeled polypeptide of the present invention in the presence of the compound. The ability of the compound to enhance or block this interaction could then be measured. Alternatively, the response of a known second messenger system following interaction of a compound to be screened and the receptor is measured and the ability of the compound to bind to the receptor and elicit a second messenger response is measured to determine if the compound is a potential agonist or antagonist. Such second messenger systems include but are not limited to, cAMP guanylate cyclase, ion channels or phosphoinositide hydrolysis.

[0798] All of these above assays can be used as diagnostic or prognostic markers. The molecules discovered using these assays can be used to treat disease or to bring about a particular result in a patient (e.g., blood vessel growth) by activating or inhibiting the polypeptide/molecule. Moreover, the assays can discover agents which may inhibit or enhance the production of the polypeptides of the invention from suitably manipulated cells or tissues.

[0799] Therefore, the invention includes a method of identifying compounds which bind to a polypeptide of the invention comprising the steps of: (a) incubating a candidate binding compound with a polypeptide of the present invention; and (b) determining if binding has occurred. Moreover, the invention includes a method of identifying agonists/antagonists comprising the steps of: (a) incubating a candidate compound with a polypeptide of the present invention, (b) assaying a biological activity, and (b) determining if a biological activity of the polypeptide has been altered.

[0800] Targeted Delivery

[0801] In another embodiment, the invention provides a method of delivering compositions to targeted cells expressing a receptor for a polypeptide of the invention, or cells expressing a cell bound form of a polypeptide of the invention.

[0802] As discussed herein, polypeptides or antibodies of the invention may be associated with heterologous polypeptides, heterologous nucleic acids, toxins, or prodrugs via hydrophobic, hydrophilic, ionic and/or covalent interactions. In one embodiment, the invention provides a method for the specific delivery of compositions of the invention to cells by administering polypeptides of the invention (including antibodies) that are associated with heterologous polypeptides or nucleic acids. In one example, the invention provides a method for delivering a therapeutic protein into the targeted cell. In another example, the invention provides a method for delivering a single stranded nucleic acid (e.g., antisense or ribozymes) or double stranded nucleic acid (e.g., DNA that can integrate into the cell's genome or replicate episomally and that can be transcribed) into the targeted cell.

[0803] In another embodiment, the invention provides a method for the specific destruction of cells (e.g., the destruction of tumor cells) by administering polypeptides of the invention (e.g., polypeptides of the invention or antibodies of the invention) in association with toxins or cytotoxic prodrugs.

[0804] By “toxin” is meant compounds that bind and activate endogenous cytotoxic effector systems, radioisotopes, holotoxins, modified toxins, catalytic subunits of toxins, or any molecules or enzymes not normally present in or on the surface of a cell that under defined conditions cause the cell's death. Toxins that may be used according to the methods of the invention include, but are not limited to, radioisotopes known in the art, compounds such as, for example, antibodies (or complement fixing containing portions thereof) that bind an inherent or induced endogenous cytotoxic effector system, thymidine kinase, endonuclease, RNAse, alpha toxin, ricin, abrin, Pseudomonas exotoxin A, diphtheria toxin, saporin, momordin, gelonin, pokeweed antiviral protein, alpha-sarcin and cholera toxin. By “cytotoxic prodrug” is meant a non-toxic compound that is converted by an-enzyme, normally present in the cell, into a cytotoxic compound. Cytotoxic prodrugs that may be used according to the methods of the invention include, but are not limited to, glutamyl derivatives of benzoic acid mustard alkylating agent, phosphate derivatives of etoposide or mitomycin C, cytosine arabinoside, daunorubisin, and phenoxyacetamide derivatives of doxorubicin.

[0805] Drug Screening

[0806] Further contemplated is the use of the polypeptides of the present invention, or the polynucleotides encoding these polypeptides, to screen for molecules which modify the activities of the polypeptides of the present invention. Such a method would include contacting the polypeptide of the present invention with a selected compound(s) suspected of having antagonist or agonist activity, and assaying the activity of these polypeptides following binding.

[0807] This invention is particularly useful for screening therapeutic compounds by using the polypeptides of the present invention, or binding fragments thereof, in any of a variety of drug screening techniques. The polypeptide or fragment employed in such a test may be affixed to a solid support, expressed on a cell surface, free in solution, or located intracellularly. One method of drug screening utilizes eukaryotic or prokaryotic host cells which are stably transformed with recombinant nucleic acids expressing the polypeptide or fragment. Drugs are screened against such transformed cells in competitive binding assays. One may measure, for example, the formulation of complexes between the agent being tested and a polypeptide of the present invention.

[0808] Thus, the present invention provides methods of screening for drugs or any other agents which affect activities mediated by the polypeptides of the present invention. These methods comprise contacting such an agent with a polypeptide of the present invention or a fragment thereof and assaying for the presence of a complex between the agent and the polypeptide or a fragment thereof, by methods well known in the art. In such a competitive binding assay, the agents to screen are typically labeled. Following incubation, free agent is separated from that present in bound form, and the amount of free or uncomplexed label is a measure of the ability of a particular agent to bind to the polypeptides of the present invention.

[0809] Another technique for drug screening provides high throughput screening for compounds having suitable binding affinity to the polypeptides of the present invention, and is described in great detail in European Patent Application 84/03564, published on Sep. 13, 1984, which is incorporated herein by reference herein. Briefly stated, large numbers of different small peptide test compounds are synthesized on a solid substrate, such as plastic pins or some other surface. The peptide test compounds are reacted with polypeptides of the present invention and washed. Bound polypeptides are then detected by methods well known in the art. Purified polypeptides are coated directly onto plates for use in the aforementioned drug screening techniques. In addition, non-neutralizing antibodies may be used to capture the peptide and immobilize it on the solid support.

[0810] This invention also contemplates the use of competitive drug screening assays in which neutralizing antibodies capable of binding polypeptides of the present invention specifically compete with a test compound for binding to the polypeptides or fragments thereof. In this manner, the antibodies are used to detect the presence of any peptide which shares one or more antigenic epitopes with a polypeptide of the invention.

[0811] Antisense and Ribozyme (Antagonists)

[0812] In specific embodiments, antagonists according to the present invention are nucleic acids corresponding to the sequences contained in SEQ ID NO:X, or the complementary strand thereof, and/or to cDNA sequences contained in cDNA Clone ID NO:Z identified for example, in Table 1A. In one embodiment, antisense sequence is generated internally, by the organism, in another embodiment, the antisense sequence is separately administered (see, for example, O'Connor, J., Neurochem. 56:560 (1991). Oligodeoxynucleotides as Antisense Inhibitors of Gene Expression, CRC Press, Boca Raton, Fla. (1988). Antisense technology can be used to control gene expression through antisense DNA or RNA, or through triple-helix formation. Antisense techniques are discussed for example, in Okano, J., Neurochem. 56:560 (1991); Oligodeoxynucleotides as Antisense Inhibitors of Gene Expression, CRC Press, Boca Raton, Fla. (1988). Triple helix formation is discussed in, for instance, Lee et al., Nucleic Acids Research 6:3073 (1979); Cooney et al., Science 241:456 (1988); and Dervan et al., Science 251:1300 (1991). The methods are based on binding of a polynucleotide to a complementary DNA or RNA.

[0813] For example, the use of c-myc and c-myb antisense RNA constructs to inhibit the growth of the non-lymphocytic leukemia cell line HL-60 and other cell lines was previously described. (Wickstrom et al. (1988); Anfossi et al. (1989)). These experiments were performed in vitro by incubating cells with the oligoribonucleotide. A similar procedure for in vivo use is described in WO 91/15580. Briefly, a pair of oligonucleotides for a given antisense RNA is produced as follows: A sequence complimentary to the first 15 bases of the open reading frame is flanked by an EcoR1 site on the 5′ end and a HindIII site on the 3′ end. Next, the pair of oligonucleotides is heated at 90° C. for one minute and then annealed in 2×ligation buffer (20 mM TRIS HCl pH 7.5, 10mM MgCl2, 10 MM dithiothreitol (DTT) and 0.2 mM ATP) and then ligated to the EcoRI/Hind III site of the retroviral vector PMV7 (WO 91/15580).

[0814] For example, the 5′ coding portion of a polynucleotide that encodes the polypeptide of the present invention may be used to design an antisense RNA oligonucleotide of from about 10 to 40 base pairs in length. A DNA oligonucleotide is designed to be complementary to a region of the gene involved in transcription thereby preventing transcription and the production of the receptor. The antisense RNA oligonucleotide hybridizes to the mRNA in vivo and blocks translation of the mRNA molecule into receptor polypeptide.

[0815] In one embodiment, the antisense nucleic acid of the invention is produced intracellularly by transcription from an exogenous sequence. For example, a vector or a portion thereof, is transcribed, producing an antisense nucleic acid (RNA) of the invention. Such a vector would contain a sequence encoding the antisense nucleic acid. Such a vector can remain episomal or become chromosomally integrated, as long as it can be transcribed to produce the desired antisense RNA. Such vectors can be constructed by recombinant DNA technology methods standard in the art. Vectors can be plasmid, viral, or others known in the art, used for replication and expression in vertebrate cells. Expression of the sequence encoding the polypeptide of the present invention or fragments thereof, can be by any promoter known in the art to act in vertebrate, preferably human cells. Such promoters can be inducible or constitutive. Such promoters include, but are not limited to, the SV40 early promoter region (Bernoist and Chambon, Nature 29:304-310 (1981), the promoter contained in the 3′ long terminal repeat of Rous sarcoma virus (Yamamoto et al., Cell 22:787-797 (1980), the herpes thymidine promoter (Wagner et al., Proc. Natl. Acad. Sci. U.S.A. 78:1441-1445 (1981), the regulatory sequences of the metallothionein gene (Brinster, et al., Nature 296:39-42 (1982)), etc.

[0816] The antisense nucleic acids of the invention comprise a sequence complementary to at least a portion of an RNA transcript of a gene of the present invention. However, absolute complementarity, although preferred, is not required. A sequence “complementary to at least a portion of an RNA,” referred to herein, means a sequence having sufficient complementarity to be able to hybridize with the RNA, forming a stable duplex; in the case of double stranded antisense nucleic acids, a single strand of the duplex DNA may thus be tested, or triplex formation may be assayed. The ability to hybridize will depend on both the degree of complementarity and the length of the antisense nucleic acid. Generally, the larger the hybridizing nucleic acid, the more base mismatches with a RNA it may contain and still form a stable duplex (or triplex as the case may be). One skilled in the art can ascertain a tolerable degree of mismatch by use of standard procedures to determine the melting point of the hybridized complex.

[0817] Oligonucleotides that are complementary to the 5′ end of the message, e.g., the 5′ untranslated sequence up to and including the AUG initiation codon, should work most efficiently at inhibiting translation. However, sequences complementary to the 3′ untranslated sequences of mRNAs have been shown to be effective at inhibiting translation of mRNAs as well. See generally, Wagner, R., 1994, Nature 372:333-335. Thus, oligonucleotides complementary to either the 5′- or 3′-non-translated, non-coding regions of polynucleotide sequences described herein could be used in an antisense approach to inhibit translation of endogenous mRNA. Oligonucleotides complementary to the 5′ untranslated region of the mRNA should include the complement of the AUG start codon. Antisense oligonucleotides complementary to mRNA coding regions are less efficient inhibitors of translation but could be used in accordance with the invention. Whether designed to hybridize to the 5′-, 3′- or coding region of mRNA of the present invention, antisense nucleic acids should be at least six nucleotides in length, and are preferably oligonucleotides ranging from 6 to about 50 nucleotides in length. In specific aspects the oligonucleotide is at least 10 nucleotides, at least 17 nucleotides, at least 25 nucleotides or at least 50 nucleotides.

[0818] The polynucleotides of the invention can be DNA or RNA or chimeric mixtures or derivatives or modified versions thereof, single-stranded or double-stranded. The oligonucleotide can be modified at the base moiety, sugar moiety, or phosphate backbone, for example, to improve stability of the molecule, hybridization, etc. The oligonucleotide may include other appended groups such as peptides (e.g., for targeting host cell receptors in vivo), or agents facilitating transport across the cell membrane (see, e.g., Letsinger et al., 1989, Proc. Natl. Acad. Sci. U.S.A. 86:6553-6556; Lemaitre et al., 1987, Proc. Natl. Acad. Sci. 84:648-652; PCT Publication No. WO88/09810, published Dec. 15, 1988) or the blood-brain barrier (see, e.g., PCT Publication No. WO89/10134, published Apr. 25, 1988), hybridization-triggered cleavage agents. (See, e.g., Krol et al., 1988, BioTechniques 6:958-976) or intercalating agents. (See, e.g., Zon, 1988, Pharm. Res. 5:539-549). To this end, the oligonucleotide may be conjugated to another molecule, e.g., a peptide, hybridization triggered cross-linking agent, transport agent, hybridization-triggered cleavage agent, etc.

[0819] The antisense oligonucleotide may comprise at least one modified base moiety which is selected from the group including, but not limited to, 5-fluorouracil, 5-bromouracil, 5-chlorouracil, 5-iodouracil, hypoxanthine, xantine, 4-acetylcytosine, 5-(carboxyhydroxylmethyl) uracil, 5-carboxymethylaminomethyl-2-thiouridine, 5-carboxymethylaminomethyluracil, dihydrouracil, beta-D-galactosylqueosine, inosine, N6-isopentenyladenine, 1-methylguanine, 1-methylinosine, 2,2-dimethylguanine, 2-methyladenine, 2-methylguanine, 3-methylcytosine, 5-methylcytosine, N6-adenine, 7-methylguanine, 5-methylaminomethyluracil, 5-methoxyaminomethyl-2-thiouracil, beta-D-mannosylqueosine, 5′-methoxycarboxymethyluracil, 5-methoxyuracil, 2-methylthio-N-6-isopentenyladenine, uracil-5-oxyacetic acid (v), wybutoxosine, pseudouracil, queosine, 2-thiocytosine, 5-methyl-2-thiouracil, 2-thiouracil, 4-thiouracil, 5-methyluracil, uracil-5-oxyacetic acid methylester, uracil-5-oxyacetic acid (v), 5-methyl-2-thiouracil, 3-(3-amino-3-N-2-carboxypropyl) uracil, (acp3)w, and 2,6-diaminopurine.

[0820] The antisense oligonucleotide may also comprise at least one modified sugar moiety selected from the group including, but not limited to, arabinose, 2-fluoroarabinose, xylulose, and hexose.

[0821] In yet another embodiment, the antisense oligonucleotide comprises at least one modified phosphate backbone selected from the group including, but not limited to, a phosphorothioate, a phosphorodithioate, a phosphoramidothioate, a phosphoramidate, a phosphordiamidate, a methylphosphonate, an alkyl phosphotriester, and a formacetal or analog thereof.

[0822] In yet another embodiment, the antisense oligonucleotide is an a-anomeric oligonucleotide. An a-anomeric oligonucleotide forms specific double-stranded hybrids with complementary RNA in which, contrary to the usual b-units, the strands run parallel to each other (Gautier et al., 1987, Nucl. Acids Res. 15:6625-6641). The oligonucleotide is a 2′-O-methylribonucleotide (Inoue et al., 1987, Nucl. Acids Res. 15:6131-6148), or a chimeric RNA-DNA analogue (Inoue et al., 1987, FEBS Lett. 215:327-330).

[0823] Polynucleotides of the invention may be synthesized by standard methods known in the art, e.g. by use of an automated DNA synthesizer (such as are commercially available from Biosearch, Applied Biosystems, etc.). As examples, phosphorothioate oligonucleotides may be synthesized by the method of Stein et al. (1988, Nucl. Acids Res. 16:3209), methylphosphonate oligonucleotides can be prepared by use of controlled pore glass polymer supports (Sarin et al., 1988, Proc. Natl. Acad. Sci. U.S.A. 85:7448-7451), etc.

[0824] While antisense nucleotides complementary to the coding region sequence could be used, those complementary to the transcribed untranslated region are most preferred.

[0825] Potential antagonists according to the invention also include catalytic RNA, or a ribozyme (See, e.g., PCT International Publication WO 90/11364, published Oct. 4, 1990; Sarver et al, Science 247:1222-1225 (1990). While ribozymes that cleave mRNA at site specific recognition sequences can be used to destroy mRNAs, the use of hammerhead ribozymes is preferred. Hammerhead ribozymes cleave mRNAs at locations dictated by flanking regions that form complementary base pairs with the target mRNA. The sole requirement is that the target mRNA have the following sequence of two bases: 5′-UG-3′. The construction and production of hammerhead ribozymes is well known in the art and is described more fully in Haseloff and Gerlach, Nature 334:585-591 (1988). There are numerous potential hammerhead ribozyme cleavage sites within the nucleotide sequence of SEQ ID NO:X. Preferably, the ribozyme is engineered so that the cleavage recognition site is located near the 5′ end of the mRNA; i.e., to increase efficiency and minimize the intracellular accumulation of non-functional mRNA transcripts.

[0826] As in the antisense approach, the ribozymes of the invention can be composed of modified oligonucleotides (e.g. for improved stability, targeting, etc.) and should be delivered to cells which express in vivo. DNA constructs encoding the ribozyme may be introduced into the cell in the same manner as described above for the introduction of antisense encoding DNA. A preferred method of delivery involves using a DNA construct “encoding” the ribozyme under the control of a strong constitutive promoter, such as, for example, pol III or pol II promoter, so that transfected cells will produce sufficient quantities of the ribozyme to destroy endogenous messages and inhibit translation. Since ribozymes unlike antisense molecules, are catalytic, a lower intracellular concentration is required for efficiency.

[0827] Antagonist/agonist compounds may be employed to inhibit the cell growth and proliferation effects of the polypeptides of the present invention on neoplastic cells and tissues, i.e. stimulation of angiogenesis of tumors, and, therefore, retard or prevent abnormal cellular growth and proliferation, for example, in tumor formation or growth.

[0828] The antagonist/agonist may also be employed to prevent hyper-vascular diseases, and prevent the proliferation of epithelial lens cells after extracapsular cataract surgery. Prevention of the mitogenic activity of the polypeptides of the present invention may also be desirous in cases such as restenosis after balloon angioplasty.

[0829] The antagonist/agonist may also be employed to prevent the growth of scar tissue during wound healing.

[0830] The antagonist/agonist may also be employed to treat the diseases described herein.

[0831] Thus, the invention provides a method of treating disorders or diseases, including but not limited to the disorders or diseases listed throughout this application, associated with overexpression of a polynucleotide of the present invention by administering to a patient (a) an antisense molecule directed to the polynucleotide of the present invention, and/or (b) a ribozyme directed to the polynucleotide of the present invention.

[0832] Binding Peptides and Other Molecules

[0833] The invention also encompasses screening methods for identifying polypeptides and nonpolypeptides that bind ovarian and/or breast antigen polypeptides, and the ovarian and/or breast antigen binding molecules identified thereby. These binding molecules are useful, for example, as agonists and antagonists of the ovarian and/or breast antigen polypeptides. Such agonists and antagonists can be used, in accordance with the invention, in the therapeutic embodiments described in detail, below.

[0834] This method comprises the steps of:

[0835] contacting ovarian and/or breast antigen polypeptides or ovarian and/or breast antigen-like polypeptides with a plurality of molecules; and

[0836] identifying a molecule that binds the ovarian and/or breast antigen polypeptides or ovarian and/or breast antigen-like polypeptides.

[0837] The step of contacting the ovarian and/or breast antigen polypeptides or ovarian and/or breast antigen-like polypeptides with the plurality of molecules may be effected in a number of ways. For example, one may contemplate immobilizing the ovarian and/or breast antigen polypeptides or ovarian and/or breast antigen-like polypeptides on a solid support and bringing a solution of the plurality of molecules in contact with the immobilized ovarian and/or breast antigen polypeptides or ovarian and/or breast antigen-like polypeptides. Such a procedure would be akin to an affinity chromatographic process, with the affinity matrix being comprised of the immobilized ovarian and/or breast antigen polypeptides or ovarian and/or breast antigen-like polypeptides. The molecules having a selective affinity for the ovarian and/or breast antigen polypeptides or ovarian and/or breast antigen-like polypeptides can then be purified by affinity selection. The nature of the solid support, process for attachment of the ovarian and/or breast antigen polypeptides or ovarian and/or breast antigen-like polypeptides to the solid support, solvent, and conditions of the affinity isolation or selection are largely conventional and well known to those of ordinary skill in the art.

[0838] Alternatively, one may also separate a plurality of polypeptides into substantially separate fractions comprising a subset of or individual polypeptides. For instance, one can separate the plurality of polypeptides by gel electrophoresis, column chromatography, or like method known to those of ordinary skill for the separation of polypeptides. The individual polypeptides can also be produced by a transformed host cell in such a way as to be expressed on or about its outer surface (e.g., a recombinant phage). Individual isolates can then be “probed” by the ovarian and/or breast antigen polypeptides or ovarian and/or breast antigen-like polypeptides, optionally in the presence of an inducer should one be required for expression, to determine if any selective affinity interaction takes place between the ovarian and/or breast antigen polypeptides or ovarian and/or breast antigen-like polypeptides and the individual clone. Prior to contacting the ovarian and/or breast antigen polypeptides or ovarian and/or breast antigen-like polypeptides with each fraction comprising individual polypeptides, the polypeptides could first be transferred to a solid support for additional convenience. Such a solid support may simply be a piece of filter membrane, such as one made of nitrocellulose or nylon. In this manner, positive clones could be identified from a collection of transformed host cells of an expression library, which harbor a DNA construct encoding a polypeptide having a selective affinity for ovarian and/or breast antigen polypeptides or ovarian and/or breast antigen-like polypeptides. Furthermore, the amino acid sequence of the polypeptide having a selective affinity for the ovarian and/or breast antigen polypeptides or ovarian and/or breast antigen-like polypeptides can be determined directly by conventional means or the coding sequence of the DNA encoding the polypeptide can frequently be determined more conveniently. The primary sequence can then be deduced from the corresponding DNA sequence. If the amino acid sequence is to be determined from the polypeptide itself, one may use microsequencing techniques. The sequencing technique may include mass spectroscopy.

[0839] In certain situations, it may be desirable to wash away any unbound ovarian and/or breast antigen polypeptides or ovarian and/or breast antigen-like polypeptides, or alternatively, unbound polypeptides, from a mixture of the ovarian and/or breast antigen polypeptides or ovarian and/or breast antigen-like polypeptides and the plurality of polypeptides prior to attempting to determine or to detect the presence of a selective affinity interaction. Such a wash step may be particularly desirable when the ovarian and/or breast antigen polypeptides or ovarian and/or breast antigen-like polypeptides or the plurality of polypeptides is bound to a solid support.

[0840] The plurality of molecules provided according to this method may be provided by way of diversity libraries, such as random or combinatorial peptide or nonpeptide libraries which can be screened for molecules that specifically bind ovarian and/or breast antigen polypeptides. Many libraries are known in the art that can be used, e.g., chemically synthesized libraries, recombinant (e.g., phage display libraries), and in vitro translation-based libraries. Examples of chemically synthesized libraries are described in Fodor et al., 1991, Science 251:767-773; Houghten et al., 1991, Nature 354:84-86; Lam et al., 1991, Nature 354:82-84; Medynski, 1994, Bio/Technology 12:709-710;Gallop et al., 1994, J. Medicinal Chemistry 37(9):1233-1251; Ohlmeyer et al., 1993, Proc. Natl. Acad. Sci. USA 90:10922-10926; Erb et al., 1994, Proc. Natl. Acad. Sci. USA 91:11422-11426; Houghten et al., 1992, Biotechniques 13:412; Jayawickreme et al., 1994, Proc. Natl. Acad. Sci. USA 91:1614-1618; Salmon et al., 1993, Proc. Natl. Acad. Sci. USA 90:11708-11712; PCT Publication No. WO 93/20242; and Brenner and Lerner, 1992, Proc. Natl. Acad. Sci. USA 89:5381-5383.

[0841] Examples of phage display libraries are described in Scott and Smith, 1990, Science 249:386-390; Devlin et al., 1990, Science, 249:404-406; Christian, R. B., et al., 1992, J. Mol. Biol. 227:711-718); Lenstra, 1992, J. Immunol. Meth. 152:149-157; Kay et al., 1993, Gene 128:59-65; and PCT Publication No. WO 94/18318 dated Aug. 18, 1994.

[0842] In vitro translation-based libraries include but are not limited to those described in PCT Publication No. WO 91/05058 dated Apr. 18, 1991; and Mattheakis et al., 1994, Proc. Natl. Acad. Sci. USA 91:9022-9026.

[0843] By way of examples of nonpeptide libraries, a benzodiazepine library (see e.g., Bunin et al., 1994, Proc. Natl. Acad. Sci. USA 91:4708-4712) can be adapted for use. Peptoid libraries (Simon et al., 1992, Proc. Natl. Acad. Sci. USA 89:9367-9371) can also be used. Another example of a library that can be used, in which the amide functionalities in peptides have been pemethylated to generate a chemically transformed combinatorial library, is described by Ostresh et al. (1994, Proc. Natl. Acad. Sci. USA 91:11138-11142).

[0844] The variety of non-peptide libraries that are useful in the present invention is great. For example, Ecker and Crooke, 1995, Bio/Technology 13:351-360 list benzodiazepines, hydantoins, piperazinediones, biphenyls, sugar analogs, beta-mercaptoketones, arylacetic acids, acylpiperidines, benzopyrans, cubanes, xanthines, aminimides, and oxazolones as among the chemical species that form the basis of various libraries.

[0845] Non-peptide libraries can be classified broadly into two types: decorated monomers and oligomers. Decorated monomer libraries employ a relatively simple scaffold structure upon which a variety functional groups is added. Often the scaffold will be a molecule with a known useful pharmacological activity. For example, the scaffold might be the benzodiazepine structure.

[0846] Non-peptide oligomer libraries utilize a large number of monomers that are assembled together in ways that create new shapes that depend on the order of the monomers. Among the monomer units that have been used are carbamates, pyrrolinones, and morpholinos. Peptoids, peptide-like oligomers in which the side chain is attached to the alpha amino group rather than the alpha carbon, form the basis of another version of non-peptide oligomer libraries. The first non-peptide oligomer libraries utilized a single type of monomer and thus contained a repeating backbone. Recent libraries have utilized more than one monomer, giving the libraries added flexibility.

[0847] Screening the libraries can be accomplished by any of a variety of commonly known methods. See, e.g., the following references, which disclose screening of peptide libraries: Parmley and Smith, 1989, Adv. Exp. Med. Biol. 251:215-218; Scott and Smith, 1990, Science 249:386-390; Fowlkes et al., 1992; BioTechniques 13:422-427; Oldenburg et al., 1992, Proc. Natl. Acad. Sci. USA 89:5393-5397; Yu et al., 1994, Cell 76:933-945; Staudt et al., 1988, Science 241:577-580; Bock et al., 1992, Nature 355:564-566; Tuerk et al., 1992, Proc. Natl. Acad. Sci. USA 89:6988-6992; Ellington et al., 1992, Nature 355:850-852; U.S. Pat. No. 5,096,815, U.S. Pat. No. 5,223,409, and U.S. Pat. No. 5,198,346, all to Ladner et al.; Rebar and Pabo, 1993, Science 263:671-673; and CT Publication No. WO 94/18318.

[0848] In a specific embodiment, screening to identify a molecule that binds ovarian and/or breast antigen polypeptides can be carried out by contacting the library members with an ovarian and/or breast antigen polypeptides or ovarian and/or breast antigen-like polypeptides immobilized on a solid phase and harvesting those library members that bind to the ovarian and/or breast antigen polypeptides or ovarian and/or breast antigen-like polypeptides. Examples of such screening methods, termed “panning” techniques are described by way of example in Parmley and Smith, 1988, Gene 73:305-318; Fowlkes et al., 1992, BioTechniques 13:422-427; International Publication No. WO 94/18318; and in references cited herein.

[0849] In another embodiment, the two-hybrid system for selecting interacting proteins in yeast (Fields and Song, 1989, Nature 340:245-246; Chien et al., 1991, Proc. Natl. Acad. Sci. USA 88:9578-9582) can be used to identify molecules that specifically bind to ovarian and/or breast antigen polypeptides or ovarian and/or breast antigen-like polypeptides.

[0850] Where the ovarian and/or breast antigen binding molecule is a polypeptide, the polypeptide can be conveniently selected from any peptide library, including random peptide libraries, combinatorial peptide libraries, or biased peptide libraries. The term “biased” is used herein to mean that the method of generating the library is manipulated so as to restrict one or more parameters that govern the diversity of the resulting collection of molecules, in this case peptides.

[0851] Thus, a truly random peptide library would generate a collection of peptides in which the probability of finding a particular amino acid at a given position of the peptide is the same for all 20 amino acids. A bias can be introduced into the library, however, by specifying, for example, that a lysine occur every fifth amino acid or that positions 4, 8, and 9 of a decapeptide library be fixed to include only arginine. Clearly, many types of biases can be contemplated, and the present invention is not restricted to any particular bias. Furthermore, the present invention contemplates specific types of peptide libraries, such as phage displayed peptide libraries and those that utilize a DNA construct comprising a lambda phage vector with a DNA insert.

[0852] As mentioned above, in the case of an ovarian and/or breast antigen binding molecule that is a polypeptide, the polypeptide may have about 6 to less than about 60 amino acid residues, preferably about 6 to about 10 amino acid residues, and most preferably, about 6 to about 22 amino acids. In another embodiment, an ovarian and/or breast antigen binding polypeptide has in the range of 15-100 amino acids, or 20-50 amino acids.

[0853] The selected ovarian and/or breast antigen binding polypeptide can be obtained by chemical synthesis or recombinant expression.

[0854] Other Activities

[0855] A polypeptide, polynucleotide, agonist, or antagonist of the present invention, as a result of the ability to stimulate vascular endothelial cell growth, may be employed in treatment for stimulating re-vascularization of ischemic tissues due to various disease conditions such as thrombosis, arteriosclerosis, and other cardiovascular conditions. The polypeptide, polynucleotide, agonist, or antagonist of the present invention may also be employed to stimulate angiogenesis and limb regeneration, as discussed above.

[0856] A polypeptide, polynucleotide, agonist, or antagonist of the present invention may also be employed for treating wounds due to injuries, burns, post-operative tissue repair, and ulcers since they are mitogenic to various cells of different origins, such as fibroblast cells and skeletal muscle cells, and therefore, facilitate the repair or replacement of damaged or diseased tissue.

[0857] A polypeptide, polynucleotide, agonist, or antagonist of the present invention may also be employed to stimulate neuronal growth and to treat and prevent neuronal damage which occurs in certain neuronal disorders or neuro-degenerative conditions such as Alzheimer's disease, Parkinson's disease, and AIDS-related complex. A polypeptide, polynucleotide, agonist, or antagonist of the present invention may have the ability to stimulate chondrocyte growth; therefore, they may be employed to enhance bone and periodontal regeneration and aid in tissue transplants or bone grafts.

[0858] A polypeptide, polynucleotide, agonist, or antagonist of the present invention may be also be employed to prevent skin aging due to sunburn by stimulating keratinocyte growth.

[0859] A polypeptide, polynucleotide, agonist, or antagonist of the present invention may also be employed for preventing hair loss, since FGF family members activate hair-forming cells and promotes melanocyte growth. Along the same lines, a polypeptide,-polynucleotide, agonist, or antagonist of the present invention may be employed to stimulate growth and differentiation of hematopoietic cells and bone marrow cells when used in combination with other cytokines.

[0860] A polypeptide, polynucleotide, agonist, or antagonist of the present invention may also be employed to maintain organs before transplantation or for supporting cell culture of primary tissues. A polypeptide, polynucleotide, agonist, or antagonist of the present invention may also be employed for inducing tissue of mesodermal origin to differentiate in early embryos.

[0861] A polypeptide, polynucleotide, agonist, or antagonist of the present invention may also increase or decrease the differentiation or proliferation of embryonic stem cells, besides, as discussed above, hematopoietic lineage.

[0862] A polypeptide, polynucleotide, agonist, or antagonist of the present invention may also be used to modulate mammalian characteristics, such as body height, weight, hair color, eye color, skin, percentage of adipose tissue, pigmentation, size, and shape (e.g., cosmetic surgery). Similarly, a polypeptide, polynucleotide, agonist, or antagonist of the present invention may be used to modulate mammalian metabolism affecting catabolism, anabolism, processing, utilization, and storage of energy.

[0863] A polypeptide, polynucleotide, agonist, or antagonist of the present invention may be used to change a mammal's mental state or physical state by influencing biorhythms, caricadic rhythms, depression (including depressive disorders), tendency for violence, tolerance for pain, reproductive capabilities (preferably by Activin or Inhibin-like activity), hormonal or endocrine levels, appetite, libido, memory, stress, or other cognitive qualities.

[0864] A polypeptide, polynucleotide, agonist, or antagonist of the present invention may also be used as a food additive or preservative, such as to increase or decrease storage capabilities, fat content, lipid, protein, carbohydrate, vitamins, minerals, cofactors or other nutritional components.

[0865] The above-recited applications have uses in a wide variety of hosts. Such hosts include, but are not limited to, human, murine, rabbit, goat, guinea pig, camel, horse, mouse, rat, hamster, pig, micro-pig, chicken, goat, cow, sheep, dog, cat, non-human primate, and human. In specific embodiments, the host is a mouse, rabbit, goat, guinea pig, chicken, rat, hamster, pig, sheep, dog or cat. In preferred embodiments, the host is a mammal. In most preferred embodiments, the host is a human.

[0866] Other Preferred Embodiments

[0867] Other preferred embodiments of the claimed invention include an isolated nucleic acid molecule comprising a nucleotide sequence which is at least 95% identical to a sequence of at least about 50 contiguous nucleotides in the nucleotide sequence of SEQ ID NO:X or the complementary strand thereto, the nucleotide sequence as defined in column 4 of Table 1A or columns 8 and 9 of Table 2 or the complementary strand thereto, and/or cDNA contained in Clone ID NO:Z.

[0868] Also preferred is a nucleic acid molecule wherein said sequence of contiguous nucleotides is included in the nucleotide sequence of the portion of SEQ ID NO:X as defined in column 4, “ORF (From-To)”, in Table 1A.

[0869] Also preferred is a nucleic acid molecule wherein said sequence of contiguous nucleotides is included in the nucleotide sequence of the portion of SEQ ID NO:X as defined in columns 8 and 9, “NT From” and “NT To” respectively, in Table 2.

[0870] Also preferred is an isolated nucleic acid molecule comprising a nucleotide sequence which is at least 95% identical to a sequence of at least about 150 contiguous nucleotides in the nucleotide sequence of SEQ ID NO:X or the complementary strand thereto, the nucleotide sequence as defined in column 4 of Table 1A or columns 8 and 9 of Table 2 or the complementary strand thereto, and/or cDNA contained in Clone ID NO:Z.

[0871] Further preferred is an isolated nucleic acid molecule comprising a nucleotide sequence which is at least 95% identical to a sequence of at least about 500 contiguous nucleotides in the nucleotide sequence of SEQ ID NO:X or the complementary strand thereto, the nucleotide sequence as defined in column 4 of Table 1A or columns 8 and 9 of Table 2 or the complementary strand thereto, and/or cDNA contained in Clone ID NO:Z.

[0872] A further preferred embodiment is a nucleic acid molecule comprising a nucleotide sequence which is at least 95% identical to the nucleotide-sequence of the portion of SEQ ID NO:X defined in column 4, “ORF (From-To)”, in Table 1A.

[0873] A further preferred embodiment is a nucleic acid molecule comprising a nucleotide sequence which is at least 95% identical to the nucleotide sequence of the portion of SEQ ID NO:X defined in columns 8 and 9, “NT From” and “NT To”, respectively, in Table 2.

[0874] A further preferred embodiment is an isolated nucleic acid molecule comprising a nucleotide sequence which is at least 95% identical to the complete nucleotide sequence of SEQ ID NO:X or the complementary strand thereto, the nucleotide sequence as defined in column 4 of Table 1A or columns 8 and 9 of Table 2 or the complementary strand thereto, and/or cDNA contained in Clone ID NO:Z.

[0875] Also preferred is an isolated nucleic acid molecule which hybridizes under stringent hybridization conditions to a nucleic acid molecule comprising a nucleotide sequence of SEQ ID NO:X or the complementary strand thereto, the nucleotide sequence as defined in column 4 of Table 1A or columns 8 and 9 of Table 2 or the complementary strand thereto, and/or cDNA contained in Clone ID NO:Z, wherein said nucleic acid molecule which hybridizes does not hybridize under stringent hybridization conditions to a nucleic acid molecule having a nucleotide sequence consisting of only A residues or of only T residues.

[0876] Also preferred is a composition of matter comprising a DNA molecule which comprises the cDNA contained in Clone ID NO:Z.

[0877] Also preferred is an isolated nucleic acid molecule comprising a nucleotide sequence which is at least 95% identical to a sequence of at least 50 contiguous nucleotides of the cDNA sequence contained in Clone ID NO:Z.

[0878] Also preferred is an isolated nucleic acid molecule, wherein said sequence of at least 50 contiguous nucleotides is included in the nucleotide sequence of an open reading frame sequence encoded by cDNA contained in Clone ID NO:Z.

[0879] Also preferred is an isolated nucleic acid molecule comprising a nucleotide sequence which is at least 95% identical to sequence of at least 150 contiguous nucleotides in the nucleotide sequence encoded by cDNA contained in Clone ID NO:Z.

[0880] A further preferred embodiment is an isolated nucleic acid molecule comprising a nucleotide sequence which is at least 95% identical to sequence of at least 500 contiguous nucleotides in the nucleotide sequence encoded by cDNA contained in Clone ID NO:Z.

[0881] A further preferred embodiment is an isolated nucleic acid molecule comprising a nucleotide sequence which is at least 95% identical to the complete nucleotide sequence encoded by cDNA contained in Clone ID NO:Z.

[0882] A further preferred embodiment is a method for detecting in a biological sample a nucleic acid molecule comprising a nucleotide sequence which is at least 95% identical to a sequence of at least 50 contiguous nucleotides in a sequence selected from the group consisting of: a nucleotide sequence of SEQ ID NO:X or the complementary strand thereto; the nucleotide sequence as defined in column 4 of Table 1A or columns 8 and 9 of Table 2 or the complementary strand thereto; and a nucleotide sequence encoded by cDNA contained in Clone ID NO:Z; which method comprises a step of comparing a nucleotide sequence of at least one nucleic acid molecule in said sample with a sequence selected from said group and determining whether the sequence of said nucleic acid molecule in said sample is at least 95% identical to said selected sequence.

[0883] Also preferred is the above method wherein said step of comparing sequences comprises determining the extent of nucleic acid hybridization between nucleic acid molecules in said sample and a nucleic acid molecule comprising said sequence selected from said group. Similarly, also preferred is the above method wherein said step of comparing sequences is performed by comparing the nucleotide sequence determined from a nucleic acid molecule in said sample with said sequence selected from said group. The nucleic acid molecules can comprise DNA molecules or RNA molecules.

[0884] A further preferred embodiment is a method for identifying the species, tissue or cell type of a biological sample which method comprises a step of detecting nucleic acid molecules in said sample, if any, comprising a nucleotide sequence that is at least 95% identical to a sequence of at least 50 contiguous nucleotides in a sequence selected from the group consisting of: a nucleotide sequence of SEQ ID NO:X or the complementary strand thereto; the nucleotide sequence as defined in column 4 of Table 1A or columns 8 and 9 of Table 2 or the complementary strand thereto; and a nucleotide sequence of the cDNA contained in Clone ID NO:Z.

[0885] The method for identifying the species, tissue or cell type of a biological sample can comprise a step of detecting nucleic acid molecules comprising a nucleotide sequence in a panel of at least two nucleotide sequences, wherein at least one sequence in said panel is at least 95% identical to a sequence of at least 50 contiguous nucleotides in a sequence selected from said group.

[0886] Also preferred is a method for diagnosing in a subject a pathological condition associated with abnormal structure or expression of a nucleotide sequence of SEQ ID NO:X or the complementary strand thereto; the nucleotide sequence as defined in column 4 of Table 1A or columns 8 and 9 of Table 2 or the complementary strand thereto; or the cDNA contained in Clone ID NO:Z which encodes a protein, wherein the method comprises a step of detecting in a biological sample obtained from said subject nucleic acid molecules, if any, comprising a nucleotide sequence that is at least 95% identical to a sequence of at least 50 contiguous nucleotides in a sequence selected from the group consisting of: a nucleotide sequence of SEQ ID NO:X or the complementary strand thereto; the nucleotide sequence as defined in column 4 of Table 1A or columns 8 and 9 of Table 2 or the complementary strand thereto; and a nucleotide sequence of cDNA contained in Clone ID NO:Z.

[0887] The method for diagnosing a pathological condition can comprise a step of detecting nucleic acid molecules comprising a nucleotide sequence in a panel of at least two nucleotide sequences, wherein at least one sequence in said panel is at least 95% identical to a sequence of at least 50 contiguous nucleotides in a sequence selected from said group.

[0888] Also preferred is a composition of matter comprising isolated nucleic acid molecules wherein the nucleotide sequences of said nucleic acid molecules comprise a panel of at least two nucleotide sequences, wherein at least one sequence in said panel is at least 95% identical to a sequence of at least 50 contiguous nucleotides in a sequence selected from the group consisting of: a nucleotide sequence of SEQ ID NO:X or the complementary strand thereto; the nucleotide sequence as defined in column 4 of Table IA or columns 8 and 9 of Table 2 or the complementary strand thereto; and a nucleotide sequence encoded by cDNA contained in Clone ID NO:Z. The nucleic acid molecules can comprise DNA molecules or RNA molecules.

[0889] Also preferred is a composition of matter comprising isolated nucleic acid molecules wherein the nucleotide sequences of said nucleic acid molecules comprise a DNA microarray or “chip” of at least 1, 2, 3, 4, 5, 6, 7, 8, 9, 10, 15, 20, 25, 30,40, 50, 100, 150, 200, 250, 300, 500, 1000, 2000, 3000, or 4000 nucleotide sequences, wherein at least one sequence in said DNA microarray or “chip” is at least 95% identical to a sequence of at least 50 contiguous nucleotides in a sequence selected from the group consisting of: a nucleotide sequence of SEQ ID NO:X wherein X is any integer as defined in Table 1A; and a nucleotide sequence encoded by a human cDNA clone identified by a cDNA “Clone ID” in Table 1A.

[0890] Also preferred is an isolated polypeptide comprising an amino acid sequence at least 90% identical to a sequence of at least about 10 contiguous amino acids in the polypeptide sequence of SEQ ID NO:Y; a polypeptide encoded by SEQ ID NO:X or the complementary strand thereto; the polypeptide encoded by the nucleotide sequence as defined in columns 8 and 9 of Table 2; and/or a polypeptide encoded by cDNA contained in Clone ID NO:Z.

[0891] Also preferred is an isolated polypeptide comprising an amino acid sequence at least 95% identical to a sequence of at least about 30 contiguous amino acids in the amino acid sequence of SEQ ID NO:Y; a polypeptide encoded by SEQ ID NO:X or the complementary strand thereto; the polypeptide encoded by the nucleotide sequence as defined in columns 8 and 9 of Table 2; and/or a polypeptide encoded by cDNA contained in Clone ID NO:Z.

[0892] Further preferred is an isolated polypeptide comprising an amino acid sequence at least 95% identical to a sequence of at least about 100 contiguous amino acids in the amino acid sequence of SEQ ID NO:Y; a polypeptide encoded by SEQ ID NO:X or the complementary strand thereto; the polypeptide encoded by the nucleotide sequence as defined in columns 8 and 9 of Table 2; and/or a polypeptide encoded by cDNA contained in Clone ID NO:Z.

[0893] Further preferred is an isolated polypeptide comprising an amino acid sequence at least 95% identical to the complete amino acid sequence of SEQ ID NO:Y; a polypeptide encoded by SEQ ID NO:X or the complementary strand thereto; the polypeptide encoded by the nucleotide sequence as defined in columns 8 and 9 of Table 2; and/or a polypeptide encoded by cDNA contained in Clone ID NO:Z.

[0894] Further preferred is an isolated polypeptide comprising an amino acid sequence at least 90% identical to a sequence of at least about 10 contiguous amino acids in the complete amino acid sequence of a polypeptide encoded by contained in Clone ID NO:Z

[0895] Also preferred is a polypeptide wherein said sequence of contiguous amino acids is included in the amino acid sequence of a portion of said polypeptide encoded by cDNA contained in Clone ID NO:Z; a polypeptide encoded by SEQ ID NO:X or the complementary strand thereto; the polypeptide encoded by the nucleotide sequence as defined in columns 8 and 9 of Table 2; and/or the polypeptide sequence of SEQ ID NO:Y.

[0896] Also preferred is an isolated polypeptide comprising an amino acid sequence at least 95% identical to a sequence of at least about 30 contiguous amino acids in the amino acid sequence of a polypeptide encoded by the cDNA contained in Clone ID NO:Z.

[0897] Also preferred is an isolated polypeptide comprising an amino acid sequence at least 95% identical to a sequence of at least about 100 contiguous amino acids in the amino acid sequence of a polypeptide encoded by cDNA contained in Clone ID NO:Z.

[0898] Also preferred is an isolated polypeptide comprising an amino acid sequence at least 95% identical to the amino acid sequence of a polypeptide encoded by the cDNA contained in Clone ID NO:Z.

[0899] Further preferred is an isolated antibody which binds specifically to a polypeptide comprising an amino acid sequence that is at least 90% identical to a sequence of at least 10 contiguous amino acids in a sequence selected from the group consisting of: a polypeptide sequence of SEQ ID NO:Y; a polypeptide encoded by SEQ ID NO:X or the complementary strand thereto; the polypeptide encoded by the nucleotide sequence as defined in columns 8 and 9 of Table 2; and a polypeptide encoded by the cDNA contained in Clone ID NO:Z.

[0900] Further preferred is a method for detecting in a biological sample a polypeptide comprising an amino acid sequence which is at least 90% identical to a sequence of at least 10 contiguous amino acids in a sequence selected from the group consisting of: a polypeptide sequence of SEQ ID NO:Y; a polypeptide encoded by SEQ ID NO:X or the complementary strand thereto; the polypeptide encoded by the nucleotide sequence as defined in columns 8 and 9 of Table 2; and a polypeptide encoded by the cDNA contained in Clone ID NO:Z; which method comprises a step of comparing an amino acid sequence of at least one polypeptide molecule in said sample with a sequence selected from said group and determining whether the sequence of said polypeptide molecule in said sample is at least 90% identical to said sequence of at least 10 contiguous amino acids.

[0901] Also preferred is the above method wherein said step of comparing an amino acid sequence of at least one polypeptide molecule in said sample with a sequence selected from said group comprises determining the extent of specific binding of polypeptides in said sample to an antibody which binds specifically to a polypeptide comprising an amino acid sequence that is at least 90% identical to a sequence of at least 10 contiguous amino acids in a sequence selected from the group consisting of: a polypeptide sequence of SEQ ID NO:Y; a polypeptide encoded by SEQ ID NO:X or the complementary strand thereto; the polypeptide encoded by the nucleotide sequence as defined in columns 8 and 9 of Table 2; and a polypeptide encoded by the cDNA contained in Clone ID NO:Z.

[0902] Also preferred is the above method wherein said step of comparing sequences is performed by comparing the amino acid sequence determined from a polypeptide molecule in said sample with said sequence selected from said group.

[0903] Also preferred is a method for identifying the species, tissue or cell type of a biological sample which method comprises a step of detecting polypeptide molecules in said sample, if any, comprising an amino acid sequence that is at least 90% identical to a sequence of at least 10 contiguous amino acids in a sequence selected from the group consisting of: polypeptide sequence of SEQ ID NO:Y; a polypeptide encoded by SEQ ID NO:X or the complementary strand thereto; the polypeptide encoded by the nucleotide sequence as defined in columns 8 and 9 of Table 2; and a polypeptide encoded by the cDNA contained in Clone ID NO:Z.

[0904] Also preferred is the above method for identifying the species, tissue or cell type of a biological sample, which method comprises a step of detecting polypeptide molecules comprising an amino acid sequence in a panel of at least two amino acid sequences, wherein at least one sequence in said panel is at least 90% identical to a sequence of at least 10 contiguous amino acids in a sequence selected from the above group.

[0905] Also preferred is a method for diagnosing in a subject a pathological condition associated with abnormal structure or expression of a nucleic acid sequence identified in Table 1A or Table 2 encoding a polypeptide, which method comprises a step of detecting in a biological sample obtained from said subject polypeptide molecules comprising an amino acid sequence in a panel of at least two amino acid sequences, wherein at least one sequence in said panel is at least 90% identical to a sequence of at least 10 contiguous amino acids in a sequence selected from the group consisting of: polypeptide sequence of SEQ ID NO:Y; a polypeptide encoded by SEQ ID NO:X or the complementary strand thereto; the polypeptide encoded by the nucleotide sequence as defined in columns 8 and 9 of Table 2; and a polypeptide encoded by the cDNA contained in Clone ID NO:Z.

[0906] In any of these methods, the step of detecting said polypeptide molecules includes using an antibody.

[0907] Also preferred is an isolated nucleic acid molecule comprising a nucleotide sequence which is at least 95% identical to a nucleotide sequence encoding a polypeptide wherein said polypeptide comprises an amino acid sequence that is at least 90% identical to a sequence of at least 10 contiguous amino acids in a sequence selected from the group consisting of: polypeptide sequence of SEQ ID NO:Y; a polypeptide encoded by SEQ ID NO:X or the complementary strand thereto; the polypeptide encoded by the nucleotide sequence as defined in columns 8 and 9 of Table 2; and a polypeptide encoded by the cDNA contained in Clone ID NO:Z.

[0908] Also preferred is an isolated nucleic acid molecule, wherein said nucleotide sequence encoding a polypeptide has been optimized for expression of said polypeptide in a prokaryotic host.

[0909] Also preferred is a polypeptide molecule, wherein said polypeptide comprises an amino acid sequence selected from the group consisting of: polypeptide sequence of SEQ ID NO:Y; a polypeptide encoded by SEQ ID NO:X or the complementary strand thereto; the polypeptide encoded by the nucleotide sequence as defined in columns 8 and 9 of Table 2; and a polypeptide encoded by the cDNA contained in Clone ID NO:Z.

[0910] Further preferred is a method of making a recombinant vector comprising inserting any of the above isolated nucleic acid molecule into a vector. Also preferred is the recombinant vector produced by this method. Also preferred is a method of making a recombinant host cell comprising introducing the vector into a host cell, as well as the recombinant host cell produced by this method.

[0911] Also preferred is a method of making an isolated polypeptide comprising culturing this recombinant host cell under conditions such that said polypeptide is expressed and recovering said polypeptide. Also preferred is this method of making an isolated polypeptide, wherein said recombinant host cell is a eukaryotic cell and said polypeptide is a human protein comprising an amino acid sequence selected from the group consisting of: polypeptide sequence of SEQ ID NO:Y; a polypeptide encoded by SEQ ID NO:X or the complementary strand thereto; the polypeptide encoded by the nucleotide sequence as defined in columns 8 and 9 of Table 2; and a polypeptide encoded by the cDNA contained in Clone ID NO:Z. The isolated polypeptide produced by this method is also preferred.

[0912] Also preferred is a method of treatment of an individual in need of an increased level of a protein activity, which method comprises administering to such an individual a Therapeutic comprising an amount of an isolated polypeptide, polynucleotide, immunogenic fragment or analogue thereof, binding agent, antibody, or antigen binding fragment of the claimed invention effective to increase the level of said protein activity in said individual.

[0913] Also preferred is a method of treatment of an individual in need of a decreased level of a protein activity, which method comprised administering to such an individual a Therapeutic comprising an amount of an isolated polypeptide, polynucleotide, immunogenic fragment or analogue thereof, binding agent, antibody, or antigen binding fragment of the claimed invention effective to decrease the level of said protein activity in said individual.

[0914] Also preferred is a method of treatment of an individual in need of a specific delivery of toxic compositions to diseased cells (e.g., tumors, leukemias or lymphomas), which method comprises administering to such an individual a Therapeutic comprising an amount of an isolated polypeptide of the invention, including, but not limited to a binding agent, or antibody of the claimed invention that are associated with toxin or cytotoxic prodrugs.

[0915] Having generally described the invention, the same will be more readily understood by reference to the following examples, which are provided by way of illustration and are not intended as limiting.

TABLE 6

| ATCC Deposits | Deposit Date | ATCC Designation Number |
|---|---|---|
| LP01, LP02, LP03, | May 20, 1997 | 209059, 209060, 209061, 209062, |
| LP04, LP05, LP06, | | 209063, 209064, 209065, 209066, |
| LP07, LP08, LP09, | | 209067, 209068, 209069 |
| LP10, LP11, | | |
| LP12 | Jan. 12, 1998 | 209579 |
| LP13 | Jan. 12, 1998 | 209578 |
| LP14 | Jul. 16, 1998 | 203067 |
| LP15 | Jul. 16, 1998 | 203068 |
| LP16 | Feb. 1, 1999 | 203609 |
| LP17 | Feb. 1, 1999 | 203610 |
| LP20 | Nov. 17, 1998 | 203485 |
| LP21 | Jun. 18, 1999 | PTA-252 |
| LP22 | Jun. 18, 1999 | PTA-253 |
| LP23 | Dec. 22, 1999 | PTA-1081 |

### EXAMPLES

### Example 1

### Isolation of a Selected cDNA Clone from the Deposited Sample

[0916] Each Clone ID NO:Z is contained in a plasmid. Table 7 identifies the vectors used to construct the cDNA library from which each clone was isolated. In many cases, the vector used to construct the library is a phage vector from which a plasmid has been excised. The following correlates the related plasmid for each phage vector used in constructing the cDNA library. For example, where a particular clone is identified in Table 7 as being isolated in the vector “Lambda Zap,” the corresponding deposited clone is in “pBluescript.”

| Vector Used to Construct Library | Corresponding Deposited Plasmid |
|---|---|
| Lambda Zap | pBluescript (pBS) |
| Uni-Zap XR | pBluescript (pBS) |
| Zap Express | pBK |
| lafmid BA | plafmid BA |
| pSport 1 | pSport 1 |
| pCMVSport 2.0 | pCMVSport 2.0 |
| pCMVSport 3.0 | pCMVSport 3.0 |
| pCR ®2.1 | pCR ®2.1 |

[0917] Vectors Lambda Zap (U.S. Pat. Nos. 5,128,256 and 5,286,636), Uni-Zap XR (U.S. Pat. Nos. 5,128, 256 and 5,286,636), Zap Express (U.S. Pat. Nos. 5,128,256 and 5,286,636), pBluescript (pBS) (Short, J. M. et al., Nucleic Acids Res. 16:7583-7600 (1988); Alting-Mees, M. A. and Short, J. M., Nucleic Acids Res. 17:9494 (1989)) and pBK (Alting-Mees, M. A. et al., Strategies 5:58-61 (1992)) are commercially available from Stratagene Cloning Systems, Inc., 11011 N. Torrey Pines Road, La Jolla, Calif., 92037. pBS contains an ampicillin resistance gene and pBK contains a neomycin resistance gene. Both can be transformed into E. coli strain XL-1 Blue, also available from Stratagene. pBS comes in 4 forms SK+, SK−, KS+ and KS. The S and K refers to the orientation of the polylinker to the T7 and T3 primer sequences which flank the polylinker region (“S” is for SacI and “K” is for KpnI which are the first sites on each respective end of the linker). “+” or “−” refer to the orientation of the f1 origin of replication (“ori”), such that in one orientation, single stranded rescue initiated from the fl ori generates sense strand DNA and in the other, antisense.

[0918] Vectors pSport1, pCMVSport 2.0 and pCMVSport 3.0, were obtained from Life Technologies, Inc., P. O. Box 6009, Gaithersburg, Md. 20897. All Sport vectors contain an ampicillin resistance gene and may be transformed into E. coli strain DH10B, also available from Life Technologies. (See, for instance, Gruber, C. E., et al., Focus 15:59 (1993).) Vector lafmid BA (Bento Soares, Columbia University, NY) contains an ampicillin resistance gene and can be transformed into E. coli strain XL-1 Blue. Vector pCR®2.1, which is available from Invitrogen, 1600 Faraday Avenue, Carlsbad, Calif. 92008, contains an ampicillin resistance gene and may be transformed into E. coli strain DH10B, available from Life Technologies. (See, for instance, Clark, J. M., Nuc. Acids Res. 16:9677-9686 (1988) and Mead, D. et al., Bio/Technology 9: (1991).) Preferably, a polynucleotide of the present invention does not comprise the vector sequences identified for the particular clone in Table 7, as well as the corresponding plasmid vector sequences designated above.

[0919] The deposited material in the sample assigned the ATCC Deposit Number cited by reference to Tables 1A, 2, 6 and 7 for any given cDNA clone also may contain one or more additional plasmids, each comprising a cDNA clone different from that given clone. Thus, deposits sharing the same ATCC Deposit Number contain at least a plasmid for each Clone ID NO:Z.

TABLE 7

| | | | ATCC |
|---|---|---|---|
| Libraries owned by Catalog | Catalog Description | Vector | Deposit |
| HUKA HUKB HUKC HUKD HUKE | Human Uterine Cancer | Lambda ZAP II | LP01 |
| HUKF HUKG | | | |
| HCNA HCNB | Human Colon | Lambda Zap II | LP01 |
| HFFA | Human Fetal Brain, random primed | Lambda Zap II | LP01 |
| HTWA | Resting T-Cell | Lambda ZAP II | LP01 |
| HBQA | Early Stage Human Brain, random | Lambda ZAP II | LP01 |
| | primed | | |
| HLMB HLMF HLMG HLMH HLMI | breast lymph node CDNA library | Lambda ZAP II | LP01 |
| HLMJ HLMM HLMN | | | |
| HCQA HCQB | human colon cancer | Lamda ZAP II | LP01 |
| HMEA HMEC HMED HMEE HMEF | Human Microvascular Endothelial | Lambda ZAP II | LP01 |
| HMEG HMEI HMEJ HMEK HMEL | Cells, fract. A | | |
| HUSA HUSC | Human Umbilical Vein Endothelial | Lambda ZAP II | LP01 |
| | Cells, fract. A | | |
| HLQA HLQB | Hepatocellular Tumor | Lambda ZAP II | LP01 |
| HHGA HHGB HHGC HHGD | Hemangiopericytoma | Lambda ZAP II | LP01 |
| HSDM | Human Striatum Depression, re-rescue | Lambda ZAP II | LP01 |
| HUSH | H Umbilical Vein Endothelial Cells, | Lambda ZAP II | LP01 |
| | frac A, re-excision | | |
| HSGS | Salivary gland, subtracted | Lambda ZAP II | LP01 |
| HFXA HFXB HFXC HFXD HFXE | Brain frontal cortex | Lambda ZAP II | LP01 |
| HFXF HFXG HFXH | | | |
| HPQA HPQB HPQC | PERM TF274 | Lambda ZAP II | LP01 |
| HFXJ HFXK | Brain Frontal Cortex, re-excision | Lambda ZAP II | LP01 |
| HCWA HCWB HCWC HCWD HCWE | CD34 positive cells (Cord Blood) | ZAP Express | LP02 |
| HCWF HCWG HCWH HCWI HCWJ | | | |
| HCWK | | | |
| HCUA HCUB HCUC | CD34 depleted Buffy Coat (Cord | ZAP Express | LP02 |
| | Blood) | | |
| HRSM | A-14 cell line | ZAP Express | LP02 |
| HRSA | A1-CELL LINE | ZAP Express | LP02 |
| HCUD HCUE HCUF HCUG HCUH | CD34 depleted Buffy Coat (Cord | ZAP Express | LP02 |
| HCUI | Blood), re-excision | | |
| HBXE HBXF HBXG | H. Whole Brain #2, re-excision | ZAP Express | LP02 |
| HRLM | L8 cell line | ZAP Express | LP02 |
| HBXA HBXB HBXC HBXD | Human Whole Brain #2 - Oligo dT > | ZAP Express | LP02 |
| | 1.5 Kb | | |
| HUDA HUDB HUDC | Testes | ZAP Express | LP02 |
| HHTM HHTN HHTO | H. hypothalamus, frac A; re-excision | ZAP Express | LP02 |
| HHTL | H. hypothalamus, frac A | ZAP Express | LP02 |
| HASA HASD | Human Adult Spleen | Uni-ZAP XR | LP03 |
| HFKC HFKD HFKE HFKF HFKG | Human Fetal Kidney | Uni-ZAP XR | LP03 |
| HE8A HE8B HE8C HE8D HE8E HE8F | Human 8 Week Whole Embryo | Uni-ZAP XR | LP03 |
| HE8M HE8N | | | |
| HGBA HGBD HGBE HGBF HGBG | Human Gall Bladder | Uni-ZAP XR | LP03 |
| HGBH HGBI | | | |
| HLHA HLHB HLHC HLHD HLHE | Human Fetal Lung III | Uni-ZAP XR | LP03 |
| HLHF HLHG HLHH HLHQ | | | |
| HPMA HPMB HPMC HPMD HPME | Human Placenta | Uni-ZAP XR | LP03 |
| HPMF HPMG HPMH | | | |
| HPRA HPRB HPRC HPRD | Human Prostate | Uni-ZAP XR | LP03 |
| HSIA HSIC HSID HSIE | Human Adult Small Intestine | Uni-ZAP XR | LP03 |
| HTEA HTEB HTEC HTED HTEE | Human Testes | Uni-ZAP XR | LP03 |
| HTEF HTEG HTEH HTEI HTEJ HTEK | | | |
| HTPA HTPB HTPC HTPD HTPE | Human Pancreas Tumor | Uni-ZAP XR | LP03 |
| HTTA HTTB HTTC HTTD HTTE | Human Testes Tumor | Uni-ZAP XR | LP03 |
| HTTF | | | |
| HAPA HAPB HAPC HAPM | Human Adult Pulmonary | Uni-ZAP XR | LP03 |
| HETA HETB HETC HETD HETE | Human Endometrial Tumor | Uni-ZAP XR | LP03 |
| HETF HETG HETH HETI | | | |
| HHFB HHFC HHFD HHFE HHFF | Human Fetal Heart | Uni-ZAP XR | LP03 |
| HHFG HHFH HHFI | | | |
| HHPB HHPC HHPD HHPE HHPF | Human Hippocampus | Uni-ZAP XR | LP03 |
| HHPG HHPH | | | |
| HCE1 HCE2 HCE3 HCE4 HCE5 HCEB | Human Cerebellum | Uni-ZAP XR | LP03 |
| HCEC HCED HCEE HCEF HCEG | | | |
| HUVB HUVC HUVD HUVE | Human Umbilical Vein, Endo remake | Uni-ZAP XR | LP03 |
| HSTA HSTB HSTC HSTD | Human Skin Tumor | Uni-ZAP XR | LP03 |
| HTAA HTAB HTAC HTAD HTAE | Human Activated T-Cells | Uni-ZAP XR | LP03 |
| HFEA HFEB HFEC | Human Fetal Epithelium (Skin) | Uni-ZAP XR | LP03 |
| HJPA HJPB HJPC HJPD | HUMAN JURKAT MEMBRANE | Uni-ZAP XR | LP03 |
| | BOUND POLYSOMES | | |
| HESA | Human epithelioid sarcoma | Uni-Zap XR | LP03 |
| HLTA HLTB HLTC HLTD HLTE | Human T-Cell Lymphoma | Uni-ZAP XR | LP03 |
| HLTF | | | |
| HFTA HFTB HFTC HFTD | Human Fetal Dura Mater | Uni-ZAP XR | LP03 |
| HRDA HRDB HRDC HRDD HRDE | Human Rhabdomyosarcoma | Uni-ZAP XR | LP03 |
| HRDF | | | |
| HCAA HCAB HCAC | Cem cells cyclohexamide treated | Uni-ZAP XR | LP03 |
| HRGA HRGB HRGC HRGD | Raji Cells, cyclohexamide treated | Uni-ZAP XR | LP03 |
| HSUA HSUB HSUC HSUM | Supt Cells, cyclohexamide treated | Uni-ZAP XR | LP03 |
| HT4A HT4C HT4D | Activated T-Cells, 12 hrs. | Uni-ZAP XR | LP03 |
| HE9A HE9B HE9C HE9D HE9E HE9F | Nine Week Old Early Stage Human | Uni-ZAP XR | LP03 |
| HE9G HE9H HE9M HE9N | | | |
| HATA HATB HATC HATD HATE | Human Adrenal Gland Tumor | Uni-ZAP XR | LP03 |
| HT5A | Activated T-Cells, 24 hrs. | Uni-ZAP XR | LP03 |
| HFGA HFGM | Human Fetal Brain | Uni-ZAP XR | LP03 |
| HNEA HNEB HNEC HNED HNEE | Human Neutrophil | Uni-ZAP XR | LP03 |
| HBGB HBGD | Human Primary Breast Cancer | Uni-ZAP XR | LP03 |
| HBNA HBNB | Human Normal Breast | Uni-ZAP XR | LP03 |
| HCAS | Cem Cells, cyclohexamide treated; | Uni-ZAP XR | LP03 |
| | subtra | | |
| HHPS | Human Hippocampus, subtracted | pBS | LP03 |
| HKCS HKCU | Human Colon Cancer, subtracted | pBS | LP03 |
| HRGS | Raji cells, cyclohexamide treated, | pBS | LP03 |
| | subtracted | | |
| HSUT | Supt cells, cyclohexamide treated, | pBS | LP03 |
| | differentially expressed | | |
| HT4S | Activated T-Cells, 12 hrs, subtracted | Uni-ZAP XR | LP03 |
| HCDA HCDB HCDC HCDD HCDE | Human Chondrosarcoma | Uni-ZAP XR | LP03 |
| HOAA HOAB HOAC | Human Osteosarcoma | Uni-ZAP XR | LP03 |
| HTLA HTLB HTLC HTLD HTLE | Human adult testis, large inserts | Uni-ZAP XR | LP03 |
| HTLF | | | |
| HLMA HLMC HLMD | Breast Lymph node cDNA library | Uni-ZAP XR | LP03 |
| H6EA H6EB H6EC | HL-60, PMA 4H | Uni-ZAP XR | LP03 |
| HTXA HTXB HTXC HTXD HTXE | Activated T-Cell (12 hs)/Thiouridine | Uni-ZAP XR | LP03 |
| HTXF HTXG HTXH | labelledEco | | |
| HNFA HNFB HNFC HNFD HNFE | Human Neutrophil, Activated | Uni-ZAP XR | LP03 |
| HNFF HNFG HNFH HNFJ | | | |
| HTOB HTOC | HUMAN TONSILS, FRACTION 2 | Uni-ZAP XR | LP03 |
| HMGB | Human OB MG63 control fraction I | Uni-ZAP XR | LP03 |
| HOPB | Human OB HOS control fraction I | Uni-ZAP XR | LP03 |
| HORB | Human OB HOS treated (10 nM E2) | Uni-ZAP XR | LP03 |
| | fraction I | | |
| HSVA HSVB HSVC | Human Chronic Synovitis | Uni-ZAP XR | LP03 |
| HROA | HUMAN STOMACH | Uni-ZAP XR | LP03 |
| HBJA HBJB HBJC HBJD HBJE HBJF | HUMAN B CELL LYMPHOMA | Uni-ZAP XR | LP03 |
| HBJG HBJH HBJI HBJJ HBJK | | | |
| HCRA HCRB HCRC | human corpus colosum | Uni-ZAP XR | LP03 |
| HODA HODB HODC HODD | human ovarian cancer | Uni-ZAP XR | LP03 |
| HDSA | Dermatofibrosarcoma Protuberance | Uni-ZAP XR | LP03 |
| HMWA HMWB HMWC HMWD | Bone Marrow Cell Line (RS4; 11) | Uni-ZAP XR | LP03 |
| HMWE HMWF HMWG HMWH | | | |
| HMWI HMWJ | | | |
| HSOA | stomach cancer (human) | Uni-ZAP XR | LP03 |
| HERA | SKIN | Uni-ZAP XR | LP03 |
| HMDA | Brain-medulloblastoma | Uni-ZAP XR | LP03 |
| HGLA HGLB HGLD | Glioblastoma | Uni-ZAP XR | LP03 |
| HEAA | H. Atrophic Endometrium | Uni-ZAP XR | LP03 |
| HBCA HBCB | H. Lymph node breast Cancer | Uni-ZAP XR | LP03 |
| HPWT | Human Prostate BPH, re-excision | Uni-ZAP XR | LP03 |
| HFVG HFVH HFVI | Fetal Liver, subtraction II | pBS | LP03 |
| HNFI | Human Neutrophils, Activated, re- | pBS | LP03 |
| | excision | | |
| HBMB HBMC HBMD | Human Bone Marrow, re-excision | pBS | LP03 |
| HKML HKMM HKMN | H. Kidney Medulla, re-excision | pBS | LP03 |
| HKIX HKIY | H. Kidney Cortex, subtracted | pBS | LP03 |
| HADT | H. Amygdala Depression, subtracted | pBS | LP03 |
| H6AS | HI-60, untreated, subtracted | Uni-ZAP XR | LP03 |
| H6ES | HL-60, PMA 4H, subtracted | Uni-ZAP XR | LP03 |
| H6BS | HL-60, RA 4h, Subtracted | Uni-ZAP XR | LP03 |
| H6CS | HL-60, PMA 1d, subtracted | Uni-ZAP XR | LP03 |
| HTXJ HTXK | Activated T-cell(12 h)/Thiouridine-re- | Uni-ZAP XR | LP03 |
| | excision | | |
| HMSA HMSB HMSC HMSD HMSE | Monocyte activated | Uni-ZAP XR | LP03 |
| HMSF HMSG HMSH HMSI HMSJ | | | |
| HMSK | | | |
| HAGA HAGB HAGC HAGD HAGE | Human Amygdala | Uni-ZAP XR | LP03 |
| HAGF | | | |
| HSRA HSRB HSRE | STROMAL-OSTEOCLASTOMA | Uni-ZAP XR | LP03 |
| HSRD HSRF HSRG HSRH | Human Osteoclastoma Stromal Cells - | Uni-ZAP XR | LP03 |
| | unamplified | | |
| HSQA HSQB HSQC HSQD HSQE | Stromal cell TF274 | Uni-ZAP XR | LP03 |
| HSQF HSQG | | | |
| HSKA HSKB HSKC HSKD HSKE | Smooth muscle, serum treated | Uni-ZAP XR | LP03 |
| HSKF HSKZ | | | |
| HSLA HSLB HSLC HSLD HSLE | Smooth muscle, control | Uni-ZAP XR | LP03 |
| HSLF HSLG | | | |
| HSDA HSDD HSDE HSDF HSDG | Spinal cord | Uni-ZAP XR | LP03 |
| HSDH | | | |
| HPWS | Prostate-BPH subtracted II | pBS | LP03 |
| HSKW HSKX HSKY | Smooth Muscle- HASTE normalized | pBS | LP03 |
| HFPB HFPC HFPD | H. Frontal cortex, epileptic; re-excision | Uni-ZAP XR | LP03 |
| HSDI HSDJ HSDK | Spinal Cord, re-excision | Uni-ZAP XR | LP03 |
| HSKN HSKO | Smooth Muscle Serum Treated, Norm | pBS | LP03 |
| HSKG HSKH HSKI | Smooth muscle, serum induced, re-exc | pBS | LP03 |
| HFCA HFCB HFCC HFCD HFCE | Human Fetal Brain | Uni-ZAP XR | LP04 |
| HFCF | | | |
| HPTA HPTB HPTD | Human Pituitary | Uni-ZAP XR | LP04 |
| HTHB HTHC HTHD | Human Thymus | Uni-ZAP XR | LP04 |
| HE6B HE6C HE6D HE6E HE6F HE6G | Human Whole Six Week Old Embryo | Uni-ZAP XR | LP04 |
| HE6S | | | |
| HSSA HSSB HSSC HSSD HSSE HSSF | Human Synovial Sarcoma | Uni-ZAP XR | LP04 |
| HSSG HSSH HSSI HSSJ HSSK | | | |
| HE7T | 7 Week Old Early Stage Human, | Uni-ZAP XR | LP04 |
| | subtracted | | |
| HEPA HEPB HEPC | Human Epididymus | Uni-ZAP XR | LP04 |
| HSNA HSNB HSNC HSNM HSNN | Human Synovium | Uni-ZAP XR | LP04 |
| HPFB HPFC HPFD HPFE | Human Prostate Cancer, Stage C | Uni-ZAP XR | LP04 |
| | fraction | | |
| HE2A HE2D HE2E HE2H HE2I HE2M | 12 Week Old Early Stage Human | Uni-ZAP XR | LP04 |
| HE2N HE2O | | | |
| HE2B HE2C HE2F HE2G HE2P HE2Q | 12 Week Old Early Stage Human, II | Uni-ZAP XR | LP04 |
| HPTS HPTT HPTU | Human Pituitary, subtracted | Uni-ZAP XR | LP04 |
| HAUA HAUB HAUC | Amniotic Cells - TNF induced | Uni-ZAP XR | LP04 |
| HAQA HAQB HAQC HAQD | Amniotic Cells - Primary Culture | Uni-ZAP XR | LP04 |
| HWTA HWTB HWTC | wilm's tumor | Uni-ZAP XR | LP04 |
| HBSD | Bone Cancer, re-excision | Uni-ZAP XR | LP04 |
| HSGB | Salivary gland, re-excision | Uni-ZAP XR | LP04 |
| HSJA HSJB HSJC | Smooth muscle-ILb induced | Uni-ZAP XR | LP04 |
| HSXA HSXB HSXC HSXD | Human Substantia Nigra | Uni-ZAP XR | LP04 |
| HSHA HSHB HSHC | Smooth muscle, IL1b induced | Uni-ZAP XR | LP04 |
| HOUA HOUB HOUC HOUD HOUE | Adipocytes | Uni-ZAP XR | LP04 |
| HPWA HPWB HPWC HPWD HPWE | Prostate BPH | Uni-ZAP XR | LP04 |
| HELA HELB HELC HELD HELE | Endothelial cells-control | Uni-ZAP XR | LP04 |
| HELF HELG HELH | | | |
| HEMA HEMB HEMC HEMD HEME | Endothelial-induced | Uni-ZAP XR | LP04 |
| HEMF HEMG HEMH | | | |
| HBIA HBIB HBIC | Human Brain, Striatum | Uni-ZAP XR | LP04 |
| HHSA HHSB HHSC HHSD HHSE | Human Hypothalmus, Schizophrenia | Uni-ZAP XR | LP04 |
| HNGA HNGB HNGC HNGD HNGE | neutrophils control | Uni-ZAP XR | LP04 |
| HNGF HNGG HNGH HNGI HNGJ | | | |
| HNHA HNHB HNHC HNHD HNHE | Neutrophils IL-1 and LPS induced | Uni-ZAP XR | LP04 |
| HNHF HNHG HNHH HNHI HNHJ | | | |
| HSDB HSDC | STRIATUM DEPRESSION | Uni-ZAP XR | LP04 |
| HHPT | Hypothalamus | Uni-ZAP XR | LP04 |
| HSAT HSAU HSAV HSAW HSAX | Anergic T-cell | Uni-ZAP XR | LP04 |
| HSAY HSAZ | | | |
| HBMS HBMT HBMU HBMV HBMW | Bone marrow | Uni-ZAP XR | LP04 |
| HBMX | | | |
| HOEA HOEB HOEC HOED HOEE | Osteoblasts | Uni-ZAP XR | LP04 |
| HOEF HOEJ | | | |
| HAIA HAIB HAIC HAID HAIE HAIF | Epithelial-TNFa and INF induced | Uni-ZAP XR | LP04 |
| HTGA HTGB HTGC HTGD | Apoptotic T-cell | Uni-ZAP XR | LP04 |
| HMCA HMCB HMCC HMCD HMCE | Macrophage-oxLDL | Uni-ZAP XR | LP04 |
| HMAA HMAB HMAC HMAD HMAE | Macrophage (GM-CSF treated) | Uni-ZAP XR | LP04 |
| HMAF HMAG | | | |
| HPHA | Normal Prostate | Uni-ZAP XR | LP04 |
| HPIA HPIB HPIC | LNCAP prostate cell line | Uni-ZAP XR | LP04 |
| HPJA HPJB HPJC | PC3 Prostate cell line | Uni-ZAP XR | LP04 |
| HOSE HOSF HOSG | Human Osteoclastoma, re-excision | Uni-ZAP XR | LP04 |
| HTGE HTGF | Apoptotic T-cell, re-excision | Uni-ZAP XR | LP04 |
| HMAJ HMAK | H Macrophage (GM-CSF treated), re- | Uni-ZAP XR | LP04 |
| | excision | | |
| HACB HACC HACD | Human Adipose Tissue, re-excision | Uni-ZAP XR | LP04 |
| HFPA | H. Frontal Cortex, Epileptic | Uni-ZAP XR | LP04 |
| HFAA HFAB HFAC HFAD HFAE | Alzheimer's, spongy change | Uni-ZAP XR | LP04 |
| HFAM | Frontal Lobe, Dementia | Uni-ZAP XR | LP04 |
| HMIA HMIB HMIC | Human Manic Depression Tissue | Uni-ZAP XR | LP04 |
| HTSA HTSE HTSF HTSG HTSH | Human Thymus | pBS | LP05 |
| HPBA HPBB HPBC HPBD HPBE | Human Pineal Gland | pBS | LP05 |
| HSAA HSAB HSAC | HSA 172 Cells | pBS | LP05 |
| HSBA HSBB HSBC HSBM | HSC172 cells | pBS | LP05 |
| HJAA HJAB HJAC HJAD | Jurkat T-cell G1 phase | pBS | LP05 |
| HJBA HJBB HJBC HJBD | Jurkat T-Cell, S phase | pBS | LP05 |
| HAFA HAFB | Aorta endothelial cells + TNF-a | pBS | LP05 |
| HAWA HAWB HAWC | Human White Adipose | pBS | LP05 |
| HTNA HTNB | Human Thyroid | pBS | LP05 |
| HONA | Normal Ovary, Premenopausal | pBS | LP05 |
| HARA HARB | Human Adult Retina | pBS | LP05 |
| HLJA HLJB | Human Lung | pCMVSport 1 | LP06 |
| HOFM HOFN HOFO | H. Ovarian Tumor, II, OV5232 | pCMVSport 2.0 | LP07 |
| HOGA HOGB HOGC | OV 10-3-95 | pCMVSport 2.0 | LP07 |
| HCGL | CD34+ cells, II | pCMVSport 2.0 | LP07 |
| HDLA | Hodgkin's Lymphoma I | pCMVSport 2.0 | LP07 |
| HDTA HDTB HDTC HDTD HDTE | Hodgkin's Lymphoma II | pCMVSport 2.0 | LP07 |
| HKAA HKAB HKAC HKAD HKAE | Keratinocyte | pCMVSport 2.0 | LP07 |
| HKAF HKAG HKAH | | | |
| HCIM | CAPFINDER, Crohn's Disease, lib 2 | pCMVSport 2.0 | LP07 |
| HKAL | Keratinocyte, lib 2 | pCMVSport 2.0 | LP07 |
| HKAT | Keratinocyte, lib 3 | pCMVSport 2.0 | LP07 |
| HNDA | Nasal polyps | pCMVSport 2.0 | LP07 |
| HDRA | H. Primary Dendritic Cells, lib 3 | pCMVSport 2.0 | LP07 |
| HOHA HOHB HOHC | Human Osteoblasts II | pCMVSport 2.0 | LP07 |
| HLDA HLDB HLDC | Liver, Hepatoma | pCMVSport 3.0 | LP08 |
| HLDN HLDO HLDP | Human Liver, normal | pCMVSport 3.0 | LP08 |
| HMTA | pBMC stimulated w/poly I/C | pCMVSport 3.0 | LP08 |
| HNTA | NTERA2, control | pCMVSport 3.0 | LP08 |
| HDPA HDPB HDPC HDPD HDPF | Primary Dendritic Cells, lib 1 | pCMVSport 3.0 | LP08 |
| HDPG HDPH HDPI HDPJ HDPK | | | |
| HDPM HDPN HDPO HDPP | Primary Dendritic cells, frac 2 | pCMVSport 3.0 | LP08 |
| HMUA HMUB HMUC | Myoloid Progenitor Cell Line | pCMVSport 3.0 | LP08 |
| HHEA HHEB HHEC HHED | T Cell helper I | pCMVSport 3.0 | LP08 |
| HHEM HHEN HHEO HHEP | T cell helper II | pCMVSport 3.0 | LP08 |
| HEQA HEQB HEQC | Human endometrial stromal cells | pCMVSport 3.0 | LP08 |
| HJMA HJMB | Human endometrial stromal cells- | pCMVSport 3.0 | LP08 |
| | treated with progesterone | | |
| HSWA HSWB HSWC | Human endometrial stromal cells- | pCMVSport 3.0 | LP08 |
| | treated with estradiol | | |
| HSYA HSYB HSYC | Human Thymus Stromal Cells | pCMVSport 3.0 | LP08 |
| HLWA HLWB HLWC | Human Placenta | pCMVSport 3.0 | LP08 |
| HRAA HRAB HRAC | Rejected Kidney, lib 4 | pCMVSport 3.0 | LP08 |
| HMTM | PCR, pBMC I/C treated | PCRII | LP09 |
| HMJA | H. Meniingima, M6 | pSport 1 | LP10 |
| HMKA HMKB HMKC HMKD HMKE | H. Meningima, M1 | pSport 1 | LP10 |
| HUSG HUSI | Human umbilical vein endothelial cells, | pSport 1 | LP10 |
| | IL-4 induced | | |
| HUSX HUSY | Human Umbilical Vein Endothelial | pSport 1 | LP10 |
| | Cells, uninduced | | |
| HOFA | Ovarian Tumor I, OV5232 | pSport 1 | LP10 |
| HCFA HCFB HCFC HCFD | T-Cell PHA 16 hrs | pSport 1 | LP10 |
| HCFL HCFM HCFN HCFO | T-Cell PHA 24 hrs | pSport 1 | LP10 |
| HADA HADC HADD HADE HADF | Human Adipose | pSport 1 | LP10 |
| HADG | | | |
| HOVA HOVB HOVC | Human Ovary | pSport 1 | LP10 |
| HTWB HTWC HTWD HTWE HTWF | Resting T-Cell Library, II | pSport 1 | LP10 |
| HMMA | Spleen metastic melanoma | pSport 1 | LP10 |
| HLYA HLYB HLYC HLYD HLYE | Spleen, Chronic lymphocytic leukemia | pSport 1 | LP10 |
| HCGA | CD34+ cell, I | pSport 1 | LP10 |
| HEOM HEON | Human Eosinophils | pSport 1 | LP10 |
| HTDA | Human Tonsil, Lib 3 | pSport 1 | LP10 |
| HSPA | Salivary Gland, Lib 2 | pSport 1 | LP10 |
| HCHA HCHB HCHC | Breast Cancer cell line, MDA 36 | pSport 1 | LP10 |
| HCHM HCHN | Breast Cancer Cell line, angiogenic | pSport 1 | LP10 |
| HCIA | Crohn's Disease | pSport 1 | LP10 |
| HDAA HDAB HDAC | HEL cell line | pSport 1 | LP10 |
| HABA | Human Astrocyte | pSport 1 | LP10 |
| HUFA HUFB HUFC | Ulcerative Colitis | pSport 1 | LP10 |
| HNTM | NTERA2 + retinoic acid, 14 days | pSport 1 | LP10 |
| HDQA | Primary Dendritic cells, CapFinder2, | pSport 1 | LP10 |
| | frac 1 | | |
| HDQM | Primary Dendritic Cells, CapFinder, | pSport 1 | LP10 |
| | frac 2 | | |
| HLDX | Human Liver, normal, CapFinder | pSport 1 | LP10 |
| HULA HULB HULC | Human Dermal Endothelial | pSport 1 | LP10 |
| | Cells, untreated | | |
| HUMA | Human Dermal Endothelial cells, treated | pSport 1 | LP10 |
| HCJA | Human Stromal Endometrial | pSport 1 | LP10 |
| | fibroblasts, untreated | | |
| HCJM | Human Stromal endometrial fibroblasts, | pSport 1 | LP10 |
| | treated w/estradiol | | |
| HEDA | Human Stromal endometrial fibroblasts, | pSport 1 | LP10 |
| | treated with progesterone | | |
| HFNA | Human ovary tumor cell OV350721 | pSport 1 | LP10 |
| HKGA HKGB HKGC HKGD | Merkel Cells | pSport 1 | LP10 |
| HISA HISB HISC | Pancreas Islet Cell Tumor | pSport 1 | LP10 |
| HLSA | Skin, burned | pSport 1 | LP10 |
| HBZA | Prostate, BPH, Lib 2 | pSport 1 | LP10 |
| HBZS | Prostate BPH, Lib 2, subtracted | pSport 1 | LP10 |
| HFIA HFIB HFIC | Synovial Fibroblasts (control) | pSport 1 | LP10 |
| HFIH HFII HFIJ | Synovial hypoxia | pSport 1 | LP10 |
| HFIT HFIU HFIV | Synovial IL-1/TNF stimulated | pSport 1 | LP10 |
| HGCA | Messangial cell, frac 1 | pSport 1 | LP10 |
| HMVA HMVB HMVC | Bone Marrow Stromal Cell, untreated | pSport 1 | LP10 |
| HFIX HFIY HFIZ | Synovial Fibroblasts (III/TNF), subt | pSport 1 | LP10 |
| HFOX HFOY HFOZ | Synovial hypoxia-RSF subtracted | pSport 1 | LP10 |
| HMQA HMQB HMQC HMQD | Human Activated Monocytes | Uni-ZAP XR | LP11 |
| HLIA HLIB HLIC | Human Liver | pCMVSport 1 | LP012 |
| HHBA HHBB HHBC HHBD HHBE | Human Heart | pCMVSport 1 | LP012 |
| HBBA HBBB | Human Brain | pCMVSport 1 | LP012 |
| HLJA HLJB HUJC HLJD HLJE | Human Lung | pCMVSport 1 | LP012 |
| HOGA HOGB HOGC | Ovarian Tumor | pCMVSport 2.0 | LP012 |
| HTJM | Human Tonsils, Lib 2 | pCMVSport 2.0 | LP012 |
| HAMF HAMG | KMH2 | pCMVSport 3.0 | LP012 |
| HAJA HAJB HAJC | L428 | pCMVSport 3.0 | LP012 |
| HWBA HWBB HWBC HWBD HWBE | Dendritic cells, pooled | pCMVSport 3.0 | LP012 |
| HWAA HWAB HWAC HWAD HWAE | Human Bone Marrow, treated | pCMVSport 3.0 | LP012 |
| HYAA HYAB HYAC | B Cell lymphoma | pCMVSport 3.0 | LP012 |
| HWHG HWHH HWHI | Healing groin wound, 6.5 hours post | pCMVSport 3.0 | LP012 |
| | incision | | |
| HWHP HWHQ HWHR | Healing groin wound; 7.5 hours post | pCMVSport 3.0 | LP012 |
| | incision | | |
| HARM | Healing groin wound - zero hr post- | pCMVSport 3.0 | LP012 |
| | incision (control) | | |
| HBIM | Olfactory epithelium; nasalcavity | pCMVSport 3.0 | LP012 |
| HWDA | Healing Abdomen wound; 70&90 min | pCMVSport 3.0 | LP012 |
| | post incision | | |
| HWEA | Healing Abdomen Wound; 15 days post | pCMVSport 3.0 | LP012 |
| | incision | | |
| HWJA | Healing Abdomen Wound; 21&29 days | pCMVSport 3.0 | LP012 |
| HNAL | Human Tongue, frac 2 | pSport 1 | LP012 |
| HMJA | H. Meniingima, M6 | pSport 1 | LP012 |
| HMKA HMKB HMKC HMKD HMKE | H. Meningima, M1 | pSport 1 | LP012 |
| HOFA | Ovarian Tumor I, OV5232 | pSport 1 | LP012 |
| HCFA HCFB HCFC HCFD | T-Cell PHA 16 hrs | pSport 1 | LP012 |
| HCFL HCFM HCFN HCFO | T-Cell PHA 24 hrs | pSport 1 | LP012 |
| HMMA HMMB HMMC | Spleen metastic melanoma | pSport 1 | LP012 |
| HTDA | Human Tonsil, Lib 3 | pSport 1 | LP012 |
| HDBA | Human Fetal Thymus | pSport 1 | LP012 |
| HDUA | Pericardium | pSport 1 | LP012 |
| HBZA | Prostate, BPH, Lib 2 | pSport 1 | LP012 |
| HWCA | Larynx tumor | pSport 1 | LP012 |
| HWKA | Normal lung | pSport 1 | LP012 |
| HSMB | Bone marrow stroma, treated | pSport 1 | LP012 |
| HBHM | Normal trachea | pSport 1 | LP012 |
| HLFC | Human Larynx | pSport 1 | LP012 |
| HLRB | Siebben Polyposis | pSport 1 | LP012 |
| HNIA | Mammary Gland | pSport 1 | LP012 |
| HNJB | Palate carcinoma | pSport 1 | LP012 |
| HNKA | Palate normal | pSport 1 | LP012 |
| HMZA | Pharynx carcinoma | pSport 1 | LP012 |
| HABG | Cheek Carcinoma | pSport 1 | LP012 |
| HMZM | Pharynx Carcinoma | pSport 1 | LP012 |
| HDRM | Larynx Carcinoma | pSport 1 | LP012 |
| HVAA | Pancreas normal PCA4 No | pSport 1 | LP012 |
| HICA | Tongue carcinoma | pSport 1 | LP012 |
| HUKA HUKB HUKC HUKD HUKE | Human Uterine Cancer | Lambda ZAP II | LP013 |
| HFFA | Human Fetal Brain, random primed | Lambda ZAP II | LP013 |
| HTUA | Activated T-cell labeled with 4-thioluri | Lambda ZAP II | LP013 |
| HBQA | Early Stage Human Brain, random | Lambda ZAP II | LP013 |
| | primed | | |
| HMEB | Human microvascular Endothelial cells, | Lambda ZAP II | LP013 |
| | fract. B | | |
| HUSH | Human Umbilical Vein Endothelial | Lambda ZAP II | LP013 |
| | cells, fract. A, re-excision | | |
| HLQC HLQD | Hepatocellular tumor, re-excision | Lambda ZAP II | LP013 |
| HTWJ HTWK HTWL | Resting T-cell, re-excision | Lambda ZAP II | LP013 |
| HF6S | Human Whole 6 week Old Embryo (II), | pBluescript | LP013 |
| | subt | | |
| HHPS | Human Hippocampus, subtracted | pBluescript | LP013 |
| HL1S | LNCAP, differential expression | pBluescript | LP013 |
| HLHS HLHT | Early Stage Human Lung, Subtracted | pBluescript | LP013 |
| HSUS | Supt cells, cyclohexamide treated, | pBluescript | LP013 |
| | subtracted | | |
| HSUT | Supt cells, cyclohexamide treated, | pBluescript | LP013 |
| | differentially expressed | | |
| HSDS | H. Striatum Depression, subtracted | pBluescript | LP013 |
| HPTZ | Human Pituitary, Subtracted VII | pBluescript | LP013 |
| HSDX | H. Striatum Depression, subt II | pBluescript | LP013 |
| HSDZ | H. Striatum Depression, subt | pBluescript | LP013 |
| HPBA HPBB HPBC HPBD HPBE | Human Pineal Gland | pBluescript SK- | LP013 |
| HRTA | Colorectal Tumor | pBluescript SK- | LP013 |
| HSBA HSBB HSBC HSBM | HSC172 cells | pBluescript SK- | LP013 |
| HJAA HJAB HJAC HJAD | Jurkat T-cell G1 phase | pBluescript SK- | LP013 |
| HJBA HJBB HJBC HJBD | Jurkat T-cell, S1 phase | pBluescript SK- | LP013 |
| HTNA HTNB | Human Thyroid | pBluescript SK- | LP013 |
| HAHA HAHB | Human Adult Heart | Uni-ZAP XR | LP013 |
| HE6A | Whole 6 week Old Embryo | Uni-ZAP XR | LP013 |
| HFCA HFCB HFCC HFCD HFCE | Human Fetal Brain | Uni-ZAP XR | LP013 |
| HFKC HFKD HFKE HFKF HFKG | Human Fetal Kidney | Uni-ZAP XR | LP013 |
| HGBA HGBD HGBE HGBF HGBG | Human Gall Bladder | Uni-ZAP XR | LP013 |
| HPRA HPRB HPRC HPRD | Human Prostate | Uni-ZAP XR | LP013 |
| HTEA HTEB HTEC HTED HTEE | Human Testes | Uni-ZAP XR | LP013 |
| HTTA HTTB HTTC HTTD HTTE | Human Testes Tumor | Uni-ZAP XR | LP013 |
| HYBA HYBB | Human Fetal Bone | Uni-ZAP XR | LP013 |
| HFLA | Human Fetal Liver | Uni-ZAP XR | LP013 |
| HHFB HHFC HHFD HHFE HHFF | Human Fetal Heart | Uni-ZAP XR | LP013 |
| HUVB HUVC HUVD HUVE | Human Umbilical Vein, End. remake | Uni-ZAP XR | LP013 |
| HTHB HTHC HTHD | Human Thymus | Uni-ZAP XR | LP013 |
| HSTA HSTB HSTC HSTD | Human Skin Tumor | Uni-ZAP XR | LP013 |
| HTAA HTAB HTAC HTAD HTAE | Human Activated T-cells | Uni-ZAP XR | LP013 |
| HFEA HFEB HFEC | Human Fetal Epithelium (skin) | Uni-ZAP XR | LP013 |
| HJPA HJPB HJPC HJPD | Human Jurkat Membrane Bound | Uni-ZAP XR | LP013 |
| | Polysomes | | |
| HESA | Human Epithelioid Sarcoma | Uni-ZAP XR | LP013 |
| HALS | Human Adult Liver, Subtracted | Uni-ZAP XR | LP013 |
| HFTA HFTB HFTC HFTD | Human Fetal Dura Mater | Uni-ZAP XR | LP013 |
| HCAA HCAB HCAC | Cem cells, cyclohexamide treated | Uni-ZAP XR | LP013 |
| HRGA HRGB HRGC HRGD | Raji Cells, cyclohexamide treated | Uni-ZAP XR | LP013 |
| HE9A HE9B HE9C HE9D HE9E | Nine Week Old Early Stage Human | Uni-ZAP XR | LP013 |
| HSFA | Human Fibrosarcoma | Uni-ZAP XR | LP013 |
| HATA HATB HATC HATD HATE | Human Adrenal Gland Tumor | Uni-ZAP XR | LP013 |
| HTRA | Human Trachea Tumor | Uni-ZAP XR | LP013 |
| HE2A HE2D HE2E HE2H HE2I | 12 Week Old Early Stage Human | Uni-ZAP XR | LP013 |
| HE2B HE2C HE2F HE2G HE2P | 12 Week Old Early Stage Human, II | Uni-ZAP XR | LP013 |
| HNEA HNEB HNEC HNED HNEE | Human Neutrophil | Uni-ZAP XR | LP013 |
| HBGA | Human Primary Breast Cancer | Uni-ZAP XR | LP013 |
| HPTS HPTT HPTU | Human Pituitary, subtracted | Uni-ZAP XR | LP013 |
| HMQA HMQB HMQC HMQD | Human Activated Monocytes | Uni-ZAP XR | LP013 |
| HOAA HOAB HOAC | Human Osteosarcoma | Uni-ZAP XR | LP013 |
| HTOA HTOD HTOE HTOF HTOG | human tonsils | Uni-ZAP XR | LP013 |
| HMGB | Human OB MG63 control fraction I | Uni-ZAP XR | LP013 |
| HOPB | Human OB HOS control fraction I | Uni-ZAP XR | LP013 |
| HOQB | Human OB HOS treated (1 nM E2) | Uni-ZAP XR | LP013 |
| | fraction I | | |
| HAUA HAUB HAUC | Amniotic Cells - TNF induced | Uni-ZAP XR | LP013 |
| HAQA HAQB HAQC HAQD | Amniotic Cells - Primary Culture | Uni-ZAP XR | LP013 |
| HROA HROC | HUMAN STOMACH | Uni-ZAP XR | LP013 |
| HBJA HBJB HBJC HBJD HBJE | HUMAN B CELL LYMPHOMA | Uni-ZAP XR | LP013 |
| HODA HODB HODC HODD | human ovarian cancer | Uni-ZAP XR | LP013 |
| HCPA | Corpus Callosum | Uni-ZAP XR | LP013 |
| HSOA | stomach cancer (human) | Uni-ZAP XR | LP013 |
| HERA | SKIN | Uni-ZAP XR | LP013 |
| HMDA | Brain-medulloblastoma | Uni-ZAP XR | LP013 |
| HGLA HGLB HGLD | Glioblastoma | Uni-ZAP XR | LP013 |
| HWTA HWTB HWTC | wilm's tumor | Uni-ZAP XR | LP013 |
| HEAA | H. Atrophic Endometrium | Uni-ZAP XR | LP013 |
| HAPN HAPO HAPP HAPQ HAPR | Human Adult Pulmonary; re-excision | Uni-ZAP XR | LP013 |
| HLTG HLTH | Human T-cell lymphoma; re-excision | Uni-ZAP XR | LP013 |
| HAHC HAHD HAHE | Human Adult Heart; re-excision | Uni-ZAP XR | LP013 |
| HAGA HAGB HAGC HAGD HAGE | Human Amygdala | Uni-ZAP XR | LP013 |
| HSJA HSJB HSJC | Smooth muscle-ILb induced | Uni-ZAP XR | LP013 |
| HSHA HSHB HSHC | Smooth muscle, IL1b induced | Uni-ZAP XR | LP013 |
| HPWA HPWB HPWC HPWD HPWE | Prostate BPH | Uni-ZAP XR | LP013 |
| HPIA HPIB HPIC | LNCAP prostate cell line | Uni-ZAP XR | LP013 |
| HPJA HPJB HPJC | PC3 Prostate cell line | Uni-ZAP XR | LP013 |
| HBTA | Bone Marrow Stroma, TNF&LPS ind | Uni-ZAP XR | LP013 |
| HMCF HMCG HMCH HMCI HMCJ | Macrophage-oxLDL; re-excision | Uni-ZAP XR | LP013 |
| HAGG HAGH HAGI | Human Amygdala; re-excision | Uni-ZAP XR | LP013 |
| HACA | H. Adipose Tissue | Uni-ZAP XR | LP013 |
| HKFB | K562 + PMA (36 hrs), re-excision | ZAP Express | LP013 |
| HCWT HCWU HCWV | CD34 positive cells (cord blood), re-ex | ZAP Express | LP013 |
| HBWA | Whole brain | ZAP Express | LP013 |
| HBXA HBXB HBXC HBXD | Human Whole Brain #2 - Oligo dT > | ZAP Express | LP013 |
| | 1.5 Kb | | |
| HAVM | Temporal cortex-Alzheizmer | pT-Adv | LP014 |
| HAVT | Hippocampus, Alzheimer Subtracted | pT-Adv | LP014 |
| HHAS | CHME Cell Line | Uni-ZAP XR | LP014 |
| HAJR | Larynx normal | pSport 1 | LP014 |
| HWLE HWLF HWLG HWLH | Colon Normal | pSport 1 | LP014 |
| HCRM HCRN HCRO | Colon Carcinoma | pSport 1 | LP014 |
| HWLI HWLJ HWLK | Colon Normal | pSport 1 | LP014 |
| HWLQ HWLR HWLS HWLT | Colon Tumor | pSport I | LP014 |
| HBFM | Gastrocnemius Muscle | pSport 1 | LP014 |
| HBOD HBOE | Quadriceps Muscle | pSport 1 | LP014 |
| HBKD HBKE | Soleus Muscle | pSport 1 | LP014 |
| HCCM | Pancreatic Langerhans | pSport 1 | LP014 |
| HWGA | Larynx carcinoma | pSport 1 | LP014 |
| HWGM HWGN | Larynx carcinoma | pSport 1 | LP014 |
| HWLA HWLB HWLC | Normal colon | pSport 1 | LP014 |
| HWLM HWLN | Colon Tumor | pSport 1 | LP014 |
| HVAM HVAN HVAO | Pancreas Tumor | pSport 1 | LP014 |
| HWGQ | Larynx carcinoma | pSport 1 | LP014 |
| HAQM HAQN | Salivary Gland | pSport 1 | LP014 |
| HASM | Stomach; normal | pSport 1 | LP014 |
| HBCM | Uterus; normal | pSport 1 | LP014 |
| HCDM | Testis; normal | pSport 1 | LP014 |
| HDJM | Brain; normal | pSport 1 | LP014 |
| HEFM | Adrenal Gland, normal | pSport 1 | LP014 |
| HBAA | Rectum normal | pSport 1 | LP014 |
| HFDM | Rectum tumour | pSport 1 | LP014 |
| HGAM | Colon, normal | pSport 1 | LP014 |
| HHMM | Colon, tumour | pSport 1 | LP014 |
| HCLB HCLC | Human Lung Cancer | Lambda Zap II | LP015 |
| HRLA | L1 Cell line | ZAP Express | LP015 |
| HHAM | Hypothalamus, Alzheimer's | pCMVSport 3.0 | LP015 |
| HKBA | Ku 812F Basophils Line | pSport 1 | LP015 |
| HS2S | Saos2, Dexamethosome Treated | pSport 1 | LP016 |
| HA5A | Lung Carcinoma A549 TNFalpha | pSport 1 | LP016 |
| | activated | | |
| HTFM | TF-1 Cell Line GM-CSF Treated | pSport 1 | LP016 |
| HYAS | Thyroid Tumour | pSport 1 | LP016 |
| HUTS | Larynx Normal | pSport 1 | LP016 |
| HXOA | Larynx Tumor | pSport 1 | LP016 |
| HEAH | Ea.hy.926 cell line | pSport 1 | LP016 |
| HINA | Adenocarcinoma Human | pSport 1 | LP016 |
| HRMA | Lung Mesothelium | pSport 1 | LP016 |
| HLCL | Human Pre-Differentiated Adipocytes | Uni-Zap XR | LP017 |
| HS2A | Saos2 Cells | pSport 1 | LP020 |
| HS2I | Saos2 Cells; Vitamin D3 Treated | pSport 1 | LP020 |
| HUCM | CHME Cell Line, untreated | pSport 1 | LP020 |
| HEPN | Aryepiglottis Normal | pSport 1 | LP020 |
| HPSN | Sinus Piniformis Tumour | pSport 1 | LP020 |
| HNSA | Stomach Normal | pSport 1 | LP020 |
| HNSM | Stomach Tumour | pSport 1 | LP020 |
| HNLA | Liver Normal Met5No | pSport 1 | LP020 |
| HUTA | Liver Tumour Met 5 Tu | pSport 1 | LP020 |
| HOCN | Colon Normal | pSport 1 | LP020 |
| HOCT | Colon Tumor | pSport 1 | LP020 |
| HTNT | Tongue Tumour | pSport 1 | LP020 |
| HLXN | Larynx Normal | pSport 1 | LP020 |
| HLXT | Larynx Tumour | pSport 1 | LP020 |
| HTYN | Thymus | pSport 1 | LP020 |
| HPLN | Placenta | pSport 1 | LP020 |
| HTNG | Tongue Normal | pSport 1 | LP020 |
| HZAA | Thyroid Normal (SDCA2 No) | pSport 1 | LP020 |
| HWES | Thyroid Thyroiditis | pSport 1 | LP020 |
| HFHD | Ficolled Human Stromal Cells, 5Fu | pTrip1Ex2 | LP021 |
| | treated | | |
| HFHM, HFHN | Ficolled Human Stromal Cells, | pTrip1Ex2 | LP021 |
| | Untreated | | |
| HPCI | Hep G2 Cells, lambda library | lambda Zap-CMV XR | LP021 |
| HBCA, HBCB, HBCC | H. Lymph node breast Cancer | Uni-ZAP XR | LP021 |
| HCOK | Chondrocytes | pSPORT1 | LP022 |
| HDCA, HDCB, HDCC | Dendritic Cells From CD34 Cells | pSPORT 1 | LP022 |
| HDMA, HDMB | CD40 activated monocyte dendritic | pSPORT 1 | LP022 |
| | cells | | |
| HDDM, HDDN, HDDO | LPS activated derived dendritic cells | pSPORT 1 | LP022 |
| HPCR | Hep G2 Cells, PCR library | lambda Zap-CMV XR | LP022 |
| HAAA, HAAB, HAAC | Lung, Cancer (4005313A3): Invasive | pSPORT 1 | LP022 |
| | Poorly Differentiated Lung | | |
| | Adenocarcinoma | | |
| HIPA, HIPB, HIPC | Lung, Cancer (4005163 B7): Invasive, | pSPORT 1 | LP022 |
| | Poorly Diff. Adenocarcinoma, | | |
| | Metastatic | | |
| HOOH, HOOI | Ovary, Cancer: (4004562 B6) Papillary | pSPORT 1 | LP022 |
| | Serous Cystic Neoplasm, Low | | |
| | Malignant Pot | | |
| HIDA | Lung, Normal: (4005313 B1) | pSPORT 1 | LP022 |
| HUJA, HUJB, HUJC, HUJD, HUJE | B-Cells | pCMVSport 3.0 | LP022 |
| HNOA, HNOB, HNOC, HNOD | Ovary, Normal: (9805C040R) | pSPORT 1 | LP022 |
| HNLM | Lung, Normal: (4005313 B1) | pSPORT 1 | LP022 |
| HSCL | Stromal Cells | pSPORT 1 | LP022 |
| HAAX | Lung, Cancer: (4005313 A3) Invasive | pSPORT 1 | LP022 |
| | Poorly-differentiated Metastatic lung | | |
| | adenocarcinoma | | |
| HUUA, HUUB, HUUC, HUUD | B-cells (unstimulated) | pTrip1Ex2 | LP022 |
| HWWA, HWWB, HWWC, HWWD, HW | B-cells (stimulated) | pSPORT 1 | LP022 |
| WE, HWWF, HWWG | | | |
| HCCC | Colon, Cancer: (9808C064R) | pCMVSport 3.0 | LP023 |
| HPDO HPDP HPDQ HPDR HPD | Ovary, Cancer (9809C332): Poorly | pSport 1 | LP023 |
| | differentiated adenocarcinoma | | |
| HPCO HPCP HPCQ HPCT | Ovary, Cancer (15395A1F): Grade II | pSport 1 | LP023 |
| | Papillary Carcinoma | | |
| HOCM HOCO HOCP HOCQ | Ovary, Cancer: (15799A1F) Poorly | pSport 1 | LP023 |
| | differentiated carcinoma | | |
| HCBM HCBN HCBO | Breast, Cancer: (4004943 A5) | pSport 1 | LP023 |
| HNBT HNBU HNBV | Breast, Normal: (4005522B2) | pSport 1 | LP023 |
| HBCP HBCQ | Breast, Cancer: (4005522 A2) | pSport 1 | LP023 |
| HBCJ | Breast, Cancer: (9806C012R) | pSport 1 | LP023 |
| HSAM HSAN | Stromal cells 3.88 | pSport 1 | LP023 |
| HVCA HVCB HVCC HVCD | Ovary, Cancer: (4004332 A2) | pSport 1 | LP023 |
| HSCK HSEN HSEO | Stromal cells (HBM3.18) | pSport 1 | LP023 |
| HSCP HSCQ | stromal cell clone 2.5 | pSport 1 | LP023 |
| HUXA | Breast Cancer: (4005385 A2) | pSport 1 | LP023 |
| HCOM HCON HCOO HCOP HCOQ | Ovary, Cancer (4004650 A3): Well- | pSport 1 | LP023 |
| | Differentiated Micropapillary Serous | | |
| | Carcinoma | | |
| HBNM | Breast, Cancer: (9802C020E) | pSport 1 | LP023 |
| HVVA HVVB HVVC HVVD HVVE | Human Bone Marrow, treated | pSport 1 | LP023 |

[0920] Two nonlimiting examples are provided below for isolating a particular clone from the deposited sample of plasmid cDNAs cited for that clone in Table 7. First, a plasmid is directly isolated by screening the clones using a polynucleotide probe corresponding to the nucleotide sequence of SEQ ID NO:X.

[0921] Particularly, a specific polynucleotide with 30-40 nucleotides is synthesized using an Applied Biosystems DNA synthesizer according to the sequence reported. The oligonucleotide is labeled, for instance, with ³²P-γ-ATP using T4 polynucleotide kinase and purified according to routine methods. (E.g., Maniatis et al., Molecular Cloning: A Laboratory Manual, Cold Spring Harbor Press, Cold Spring, N.Y. (1982).) The plasmid mixture is transformed into a suitable host, as indicated above (such as XL-1 Blue (Stratagene)) using techniques known to those of skill in the art, such as those provided by the vector supplier or in related publications or patents cited above. The transformants are plated on 1.5% agar plates (containing the appropriate selection agent, e.g., ampicillin) to a density of about 150 transformants (colonies) per plate. These plates are screened using Nylon membranes according to routine methods for bacterial colony screening (e.g., Sambrook et al., Molecular Cloning: A Laboratory Manual, 2nd Edit., (1989), Cold Spring Harbor Laboratory Press, pages 1.93 to 1.104), or other techniques known to those of skill in the art.

[0922] Alternatively, two primers of 17-20 nucleotides derived from both ends of the nucleotide sequence of SEQ ID NO:X are synthesized and used to amplify the desired cDNA using the deposited cDNA plasmid as a template. The polymerase chain reaction is carried out under routine conditions, for instance, in 25 μl of reaction mixture with 0.5 ug of the above cDNA template. A convenient reaction mixture is 1.5-5 mM MgCl₂, 0.01% (w/v) gelatin, 20 μM each of dATP, dCTP, dGTP, dTTP, 25 pmol of each primer and 0.25 Unit of Taq polymerase. Thirty five cycles of PCR (denaturation at 94° C. for 1 min; annealing at 55° C. for 1 min; elongation at 72° C. for 1 min) are performed with a Perkin-Elmer Cetus automated thermal cycler. The amplified product is analyzed by agarose gel electrophoresis and the DNA band with expected molecular weight is excised and purified. The PCR product is verified to be the selected sequence by subcloning and sequencing the DNA product.

[0923] Several methods are available for the identification of the 5′ or 3′ non-coding portions of a gene which may not be present in the deposited clone. These methods include but are not limited to, filter probing, clone enrichment using specific probes, and protocols similar or identical to 5′ and 3′ “RACE” protocols which are well known in the art. For instance, a method similar to 5′ RACE is available for generating the missing 5′ end of a desired full-length transcript. (Fromont-Racine et al., Nucleic Acids Res. 21(7):1683-1684 (1993).)

[0924] Briefly, a specific RNA oligonucleotide is ligated to the 5′ ends of a population of RNA presumably containing full-length gene RNA transcripts. A primer set containing a primer specific to the ligated RNA oligonucleotide and a primer specific to a known sequence of the gene of interest is used to PCR amplif the 5′ portion of the desired full-length gene. This amplified product may then be sequenced and used to generate the full length gene.

[0925] This above method starts with total RNA isolated from the desired source, although poly-A+ RNA can be used. The RNA preparation can then be treated with phosphatase if necessary to eliminate 5′ phosphate groups on degraded or damaged RNA which may interfere with the later RNA ligase step. The phosphatase should then be inactivated and the RNA treated with tobacco acid pyrophosphatase in order to remove the cap structure present at the 5′ ends of messenger RNAs. This reaction leaves a 5′ phosphate group at the 5′ end of the cap cleaved RNA which can then be ligated to an RNA oligonucleotide using T4 RNA ligase.

[0926] This modified RNA preparation is used as a template for first strand cDNA synthesis using a gene specific oligonucleotide. The first strand synthesis reaction is used as a template for PCR amplification of the desired 5′ end using a primer specific to the ligated RNA oligonucleotide and a primer specific to the known sequence of the gene of interest. The resultant product is then sequenced and analyzed to confirm that the 5′ end sequence belongs to the desired gene.

### Example 2

### Isolation of Genomic Clones Corresponding to a Polynucleotide

[0927] A human genomic PI library (Genomic Systems, Inc.) is screened by PCR using primers selected for the sequence corresponding to SEQ ID NO:X according to the method described in Example 1. (See also, Sambrook et al., Molecular Cloning: A Laboratory Manual, 2nd Edn., (1989), Cold Spring Harbor Laboratory Press).

### Example 3

### Tissue Specific Expression Analysis

[0928] The Human Genome Sciences, Inc. (HGS) database is derived from sequencing tissue and/or disease specific cDNA libraries. Libraries generated from a particular tissue are selected and the specific tissue expression pattern of EST groups or assembled contigs within these libraries is determined by comparison of the expression patterns of those groups or contigs within the entire database. ESTs and assembled contigs which show tissue specific expression are selected.

[0929] The original clone from which the specific EST sequence was generated, or in the case of an assembled contig, the clone from which the 5′ most EST sequence was generated, is obtained from the catalogued library of clones and the insert amplified by PCR using methods known in the art. The PCR product is denatured and then transferred in 96 or 384 well format to a nylon membrane (Schleicher and Scheull) generating an array filter of tissue specific clones. Housekeeping genes, maize genes, and known tissue specific genes are included on the filters. These targets can be used in signal normalization and to validate assay sensitivity. Additional targets are included to monitor probe length and specificity of hybridization.

[0930] Radioactively labeled hybridization probes are generated by first strand cDNA synthesis per the manufacturer's instructions (Life Technologies) from mRNA/RNA samples prepared from the specific tissue being analyzed (e.g., breast, breast cancer, ovarian, ovarian cancer). The hybridization probes are purified by gel exclusion chromatography, quantitated, and hybridized with the array filters in hybridization bottles at 65° C. overnight. The filters are washed under stringent conditions and signals are captured using a Fuji phosphorimager.

[0931] Data is extracted using AIS software and following background subtraction, signal normalization is performed. This includes a normalization of filter-wide expression levels between different experimental runs. Genes that are differentially expressed in the tissue of interest are identified.

### Example 4

### Chromosomal Mapping of the Polynucleotides

[0932] An oligonucleotide primer set is designed according to the sequence at the 5′ end of SEQ ID NO:X. This primer preferably spans about 100 nucleotides. This primer set is then used in a polymerase chain reaction under the following set of conditions: 30 seconds, 95° C.; 1 minute, 56° C.; 1 minute, 70° C. This cycle is repeated 32 times followed by one 5 minute cycle at 70° C. Human, mouse, and hamster DNA is used as template in addition to a somatic cell hybrid panel containing individual chromosomes or chromosome fragments (Bios, Inc). The reactions are analyzed on either 8% polyacrylamide gels or 3.5% agarose gels. Chromosome mapping is determined by the presence of an approximately 100 bp PCR fragment in the particular somatic cell hybrid.

### Example 5

### Bacterial Expression of a Polypeptide

[0933] A polynucleotide encoding a polypeptide of the present invention is amplified using PCR oligonucleotide primers corresponding to the 5′ and 3′ ends of the DNA sequence, as outlined in Example 1, to synthesize insertion fragments. The primers used to amplify the cDNA insert should preferably contain restriction sites, such as BamHI and XbaI, at the 5′ end of the primers in order to clone the amplified product into the expression vector. For example, BamHI and XbaI correspond to the restriction enzyme sites on the bacterial expression vector pQE-9. (Qiagen, Inc., Chatsworth, Calif.). This plasmid vector encodes antibiotic resistance (Amp^{r}), a bacterial origin of replication (ori), an IPTG-regulatable promoter/operator (P/O), a ribosome binding site (RBS), a 6-histidine tag (6-His), and restriction enzyme cloning sites.

[0934] The pQE-9 vector is digested with BamHI and XbaI and the amplified fragment is ligated into the pQE-9 vector maintaining the reading frame initiated at the bacterial RBS. The ligation mixture is then used to transform the E. coli strain M15/rep4 (Qiagen, Inc.) which contains multiple copies of the plasmid pREP4, which expresses the lacI repressor and also confers kanamycin resistance (Kan^{r}). Transformants are identified by their ability to grow on LB plates and ampicillin/kanamycin resistant colonies are selected. Plasmid DNA is isolated and confirmed by restriction analysis.

[0935] Clones containing the desired constructs are grown overnight (ON) in liquid culture in LB media supplemented with both Amp (100 ug/ml) and Kan (25 ug/ml). The O/N culture is used to inoculate a large culture at a ratio of 1:100 to 1:250. The cells are grown to an optical density 600 (O.D.⁶⁰⁰) of between 0.4 and 0.6. IPTG (Isopropyl-B-D-thiogalacto pyranoside) is then added to a final concentration of 1 mM. IPTG induces by inactivating the lacI repressor, clearing the P/O leading to increased gene expression.

[0936] Cells are grown for an extra 3 to 4 hours. Cells are then harvested by centrifugation (20 mins at 6000×g). The cell pellet is solubilized in the chaotropic agent 6 Molar Guanidine HCl by stirring for 3-4 hours at 4° C. The cell debris is removed by centrifugation, and the supernatant containing the polypeptide is loaded onto a nickel-nitrilo-tri-acetic acid (“Ni-NTA”) affinity resin column (available from QIAGEN, Inc., supra). Proteins with a 6×His tag bind to the Ni-NTA resin with high affinity and can be purified in a simple one-step procedure (for details see: The QIAexpressionist (1995) QIAGEN, Inc., supra).

[0937] Briefly, the supernatant is loaded onto the column in 6 M guanidine-HCl, pH 8. The column is first washed with 10 volumes of 6 M guanidine-HCl, pH 8, then washed with 10 volumes of 6 M guanidine-HCl pH 6, and finally the polypeptide is eluted with 6 M guanidine-HCl, pH 5.

[0938] The purified protein is then renatured by dialyzing it against phosphate-buffered saline (PBS) or 50 mM Na-acetate, pH 6 buffer plus 200 mM NaCl. Alternatively, the protein can be successfully refolded while immobilized on the Ni-NTA column. The recommended conditions are as follows: renature using a linear 6M-1M urea gradient in 500 mM NaCl, 20% glycerol, 20 mM Tris/HCl pH 7.4, containing protease inhibitors. The renaturation should be performed over a period of 1.5 hours or more. After renaturation the proteins are eluted by the addition of 250 mM immidazole. Immidazole is removed by a final dialyzing step against PBS or 50 mM sodium acetate pH 6 buffer plus 200 mM NaCl. The purified protein is stored at 4° C. or frozen at −80° C.

[0939] In addition to the above expression vector, the present invention further includes an expression vector, called pHE4a (ATCC Accession Number 209645, deposited on Feb. 25, 1998) which contains phage operator and promoter elements operatively linked to a polynucleotide of the present invention. This vector contains: 1) a neomycinphosphotransferase gene as a selection marker, 2) an E. coli origin of replication, 3) a T5 phage promoter sequence, 4) two lac operator sequences, 5) a Shine-Delgamo sequence, and 6) the lactose operon repressor gene (lacIq). The origin of replication (oriC) is derived from pUCl9 (LTI, Gaithersburg, Md.). The promoter and operator sequences are made synthetically.

[0940] DNA can be inserted into the pHE4a by restricting the vector with NdeI and XbaI, BamHI, XhoI, or Asp718, running the restricted product on a gel, and isolating the larger fragment (the stuffer fragment should be about 310 base pairs). The DNA insert is generated according to the PCR protocol described in Example 1, using PCR primers having restriction sites for NdeI (5′ primer) and XbaI, BamHI, XhoI, or Asp718 (3′ primer). The PCR insert is gel purified and restricted with compatible enzymes. The insert and vector are ligated according to standard protocols.

[0941] The engineered vector could easily be substituted in the above protocol to express protein in a bacterial system.

### Example 6

### Purification of a Polypeptide from an Inclusion Body

[0942] The following alternative method can be used to purify a polypeptide expressed in E coli when it is present in the form of inclusion bodies. Unless otherwise specified, all of the following steps are conducted at 4-10C.

[0943] Upon completion of the production phase of the E. coli fermentation, the cell culture is cooled to 4-10° C. and the cells harvested by continuous centrifugation at 15,000 rpm (Heraeus Sepatech). On the basis of the expected yield of protein per unit weight of cell paste and the amount of purified protein required, an appropriate amount of cell paste, by weight, is suspended in a buffer solution containing 100 mM Tris, 50 mM EDTA, pH 7.4. The cells are dispersed to a homogeneous suspension using a high shear mixer.

[0944] The cells are then lysed by passing the solution through a microfluidizer (Microfuidics, Corp. or APV Gaulin, Inc.) twice at 4000-6000 psi. The homogenate is then mixed with NaCl solution to a final concentration of 0.5 M NaCl, followed by centrifugation at 7000×g for 15 min. The resultant pellet is washed again using 0.5M NaCl, 100 mM Tris, 50 mM EDTA, pH 7.4.

[0945] The resulting washed inclusion bodies are solubilized with 1.5 M guanidine hydrochloride (GuHCl) for 2-4 hours. After 7000×g centrifugation for 15 min., the pellet is discarded and the polypeptide containing supernatant is incubated at 4° C. overnight to allow further GuHCl extraction.

[0946] Following high speed centrifugation (30,000×g) to remove insoluble particles, the GuHCl solubilized protein is refolded by quickly mixing the GuHCl extract with 20 volumes of buffer containing 50 mM sodium, pH 4.5, 150 mM NaCl, 2 mM EDTA by vigorous stirring. The refolded diluted protein solution is kept at 4° C. without mixing for 12 hours prior to further purification steps.

[0947] To clarify the refolded polypeptide solution, a previously prepared tangential filtration unit equipped with 0.16 μm membrane filter with appropriate surface area (e.g., Filtron), equilibrated with 40 mM sodium acetate, pH 6.0 is employed. The filtered sample is loaded onto a cation exchange resin (e.g., Poros HS-50, Perseptive Biosystems). The column is washed with 40 mM sodium acetate, pH 6.0 and eluted with 250 mM, 500 mM, 1000 mM, and 1500 mM NaCl in the same buffer, in a stepwise manner. The absorbance at 280 nm of the effluent is continuously monitored. Fractions are collected and further analyzed by SDS-PAGE.

[0948] Fractions containing the polypeptide are then pooled and mixed with 4 volumes of water. The diluted sample is then loaded onto a previously prepared set of tandem columns of strong anion (Poros HQ-50, Perseptive Biosystems) and weak anion (Poros CM-20, Perseptive Biosystems) exchange resins. The columns are equilibrated with 40 mM sodium acetate, pH 6.0. Both columns are washed with 40 mM sodium acetate, pH 6.0, 200 mM NaCl. The CM-20 column is then eluted using a 10 column volume linear gradient ranging from 0.2 M NaCl, 50 mM sodium acetate, pH 6.0 to 1.0 M NaCl, 50 mM sodium acetate, pH 6.5. Fractions are collected under constant A₂₈₀ monitoring of the effluent. Fractions containing the polypeptide (determined, for instance, by 16% SDS-PAGE) are then pooled.

[0949] The resultant polypeptide should exhibit greater than 95% purity after the above refolding and purification steps. No major contaminant bands should be observed from Commassie blue stained 16% SDS-PAGE gel when 5 μg of purified protein is loaded. The purified protein can also be tested for endotoxin/LPS contamination, and typically the LPS content is less than 0.1 ng/ml according to LAL assays.

### Example 7

### Cloning and Expression of a Polypeptide in a Baculovirus Expression System

[0950] In this example, the plasmid shuttle vector pA2 is used to insert a polynucleotide into a baculovirus to express a polypeptide. This expression vector contains the strong polyhedrin promoter of the Autographa californica nuclear polyhedrosis virus (AcMNPV) followed by convenient restriction sites such as BamHI, Xba I and Asp718. The polyadenylation site of the simian virus 40 (“SV40”) is used for efficient polyadenylation. For easy selection of recombinant virus, the plasmid contains the beta-galactosidase gene from E. coli under control of a weak Drosophila promoter in the same orientation, followed by the polyadenylation signal of the polyhedrin gene. The inserted genes are flanked on both sides by viral sequences for cell-mediated homologous recombination with wild-type viral DNA to generate a viable virus that express the cloned polynucleotide.

[0951] Many other baculovirus vectors can be used in place of the vector above, such as pAc373, pVL941, and pAcIM1, as one skilled in the art would readily appreciate, as long as the construct provides appropriately located signals for transcription, translation, secretion and the like, including a signal peptide and an in-frame AUG as required. Such vectors are described, for instance, in Luckow et al., Virology 170:31-39 (1989).

[0952] Specifically, the cDNA sequence contained in the deposited clone, including the AUG initiation codon, is amplified using the PCR protocol described in Example 1. If a naturally occurring signal sequence is used to produce the polypeptide of the present invention, the pA2 vector does not need a second signal peptide. Alternatively, the vector can be modified (pA2 GP) to include a baculovirus leader sequence, using the standard methods described in Summers et al., “A Manual of Methods for Baculovirus Vectors and Insect Cell Culture Procedures,” Texas Agricultural Experimental Station Bulletin No. 1555 (1987).

[0953] The amplified fragment is isolated from a 1% agarose gel using a commercially available kit (“Geneclean,” BIO 101 Inc., La Jolla, Calif.). The fragment then is digested with appropriate restriction enzymes and again purified on a 1% agarose gel.

[0954] The plasmid is digested with the corresponding restriction enzymes and optionally, can be dephosphorylated using calf intestinal phosphatase, using routine procedures known in the art. The DNA is then isolated from a 1% agarose gel using a commercially available kit (“Geneclean” BIO 101 Inc., La Jolla, Calif.).

[0955] The fragment and the dephosphorylated plasmid are ligated together with T4 DNA ligase. E. coli HB101 or other suitable E. coli hosts such as XL-1 Blue (Stratagene Cloning Systems, La Jolla, Calif.) cells are transformed with the ligation mixture and spread on culture plates. Bacteria containing the plasmid are identified by digesting DNA from individual colonies and analyzing the digestion product by gel electrophoresis. The sequence of the cloned fragment is confirmed by DNA sequencing.

[0956] Five μg of a plasmid containing the polynucleotide is co-transfected with 1.0 μg of a commercially available linearized baculovirus DNA (“BaculoGold™ baculovirus DNA”, Pharmingen, San Diego, Calif.), using the lipofection method described by Felgner et al., Proc. Natl. Acad. Sci. USA 84:7413-7417 (1987). One μg of BaculoGold™ virus DNA and 5 μg of the plasmid are mixed in a sterile well of a microtiter plate containing 50 μl of serum-free Grace's medium (Life Technologies Inc., Gaithersburg, Md.). Afterwards, 10 μl Lipofectin plus 90 μl Grace's medium are added, mixed and incubated for 15 minutes at room temperature. Then the transfection mixture is added drop-wise to Sf9 insect cells (ATCC CRL 1711) seeded in a 35 mm tissue culture plate with 1 ml Grace's medium without serum. The plate is then incubated for 5 hours at 27° C. The transfection solution is then removed from the plate and 1 ml of Grace's insect medium supplemented with 10% fetal calf serum is added. Cultivation is then continued at 27° C. for four days.

[0957] After four days the supernatant is collected and a plaque assay is performed, as described by Summers and Smith, supra. An agarose gel with “Blue Gal” (Life Technologies Inc., Gaithersburg) is used to allow easy identification and isolation of gal-expressing clones, which produce blue-stained plaques. (A detailed description of a “plaque assay” of this type can also be found in the user's guide for insect cell culture and baculovirology distributed by Life Technologies Inc., Gaithersburg, page 9-10.) After appropriate incubation, blue stained plaques are picked with the tip of a micropipettor (e.g., Eppendorf). The agar containing the recombinant viruses is then resuspended in a microcentrifuge tube containing 200 μl of Grace's medium and the suspension containing the recombinant baculovirus is used to infect Sf9 cells seeded in 35 mm dishes. Four days later the supernatants of these culture dishes are harvested and then they are stored at 4° C.

[0958] To verify the expression of the polypeptide, Sf9 cells are grown in Grace's medium supplemented with 10% heat-inactivated FBS. The cells are infected with the recombinant baculovirus containing the polynucleotide at a multiplicity of infection (“MOI”) of about 2. If radiolabeled proteins are desired, 6 hours later the medium is removed and is replaced with SF900 II medium minus methionine and cysteine (available from Life Technologies Inc., Rockville, Md.). After 42 hours, 5 μCi of³⁵S-methionine and 5 μCi ³⁵S-cysteine (available from Amersham) are added. The cells are further incubated for 16 hours and then are harvested by centrifugation. The proteins in the supernatant as well as the intracellular proteins are analyzed by SDS-PAGE followed by autoradiography (if radiolabeled).

[0959] Microsequencing of the amino acid sequence of the amino terminus of purified protein may be used to determine the amino terminal sequence of the produced protein.

### Example 8

### Expression of a Polypeptide in Mammalian Cells

[0960] The polypeptide of the present invention can be expressed in a mammalian cell. A typical mammalian expression vector contains a promoter element, which mediates the initiation of transcription of mRNA, a protein coding sequence, and signals required for the termination of transcription and polyadenylation of the transcript. Additional elements include enhancers, Kozak sequences and intervening sequences flanked by donor and acceptor sites for RNA splicing. Highly efficient transcription is achieved with the early and late promoters from SV40, the long terminal repeats (LTRs) from Retroviruses, e.g., RSV, HTLVI, HIVI and the early promoter of the cytomegalovirus (CMV). However, cellular elements can also be used (e.g., the human actin promoter).

[0961] Suitable expression vectors for use in practicing the present invention include, for example, vectors such as pSVL and pMSG (Pharmacia, Uppsala, Sweden), pRSVcat (ATCC 37152), pSV2dhfr (ATCC 37146), pBC12MI (ATCC 67109), pCMVSport 2.0, and pCMVSport 3.0. Mammalian host cells that could be used include, human Hela, 293, H9 and Jurkat cells, mouse NIH3T3 and C127 cells, Cos 1, Cos 7 and CV1, quail QC1-3 cells, mouse L cells and Chinese hamster ovary (CHO) cells.

[0962] Alternatively, the polypeptide can be expressed in stable cell lines containing the polynucleotide integrated into a chromosome. The co-transfection with a selectable marker such as DHFR, gpt, neomycin, or hygromycin allows the identification and isolation of the transfected cells.

[0963] The transfected gene can also be amplified to express large amounts of the encoded protein. The DHFR (dihydrofolate reductase) marker is useful in developing cell lines that carry several hundred or even several thousand copies of the gene of interest. (See, e.g., Alt, F. W., et al., J. Biol. Chem. 253:1357-1370 (1978); Hamlin, J. L. and Ma, C., Biochem. et Biophys. Acta, 1097:107-143 (1990); Page, M. J. and Sydenham, M. A., Biotechnology 9:64-68 (1991).) Another useful selection marker is the enzyme glutamine synthase (GS) (Murphy et al., Biochem J. 227:277-279 (1991); Bebbington et al., Bio/Technology 10:169-175 (1992). Using these markers, the mammalian cells are grown in selective medium and the cells with the highest resistance are selected. These cell lines contain the amplified gene(s) integrated into a chromosome. Chinese hamster ovary (CHO) and NSO cells are often used for the production of proteins.

[0964] Derivatives of the plasmid pSV2-dhfr (ATCC Accession No. 37146), the expression vectors pC4 (ATCC Accession No. 209646) and pC6 (ATCC Accession No.209647) contain the strong promoter (LTR) of the Rous Sarcoma Virus (Cullen et al., Molecular and Cellular Biology, 438-447 (March, 1985)) plus a fragment of the CMV-enhancer (Boshart et al., Cell 41:521-530 (1985).) Multiple cloning sites, e.g., with the restriction enzyme cleavage sites BamHI, XbaI and Asp718, facilitate the cloning of the gene of interest. The vectors also contain the 3′ intron, the polyadenylation and termination signal of the rat preproinsulin gene, and the mouse DHFR gene under control of the SV40 early promoter.

[0965] Specifically, the plasmid pC6, for example, is digested with appropriate restriction enzymes and then dephosphorylated using calf intestinal phosphates by procedures known in the art. The vector is then isolated from a 1% agarose gel.

[0966] A polynucleotide of the present invention is amplified according to the protocol outlined in Example 1. If a naturally occurring signal sequence is used to produce the polypeptide of the present invention, the vector does not need a second signal peptide. Alternatively, if a naturally occurring signal sequence is not used, the vector can be modified to include a heterologous signal sequence. (See, e.g., International Publication No. WO 96/34891.)

[0967] The amplified fragment is isolated from a 1% agarose gel using a commercially available kit (“Geneclean,” BIO 101 Inc., La Jolla, Calif.). The fragment then is digested with appropriate restriction enzymes and again purified on a 1% agarose gel.

[0968] The amplified fragment is then digested with the same restriction enzyme and purified on a 1% agarose gel. The isolated fragment and the dephosphorylated vector are then ligated with T4 DNA ligase. E. coli HB101 or XL-1 Blue cells are then transformed and bacteria are identified that contain the fragment inserted into plasmid pC6 using, for instance, restriction enzyme analysis.

[0969] Chinese hamster ovary cells lacking an active DHFR gene is used for transfection. Five μg of the expression plasmid pC6 or pC4 is cotransfected with 0.5 μg of the plasmid pSVneo using lipofectin (Felgner et al., supra). The plasmid pSV2-neo contains a dominant selectable marker, the neo gene from Tn5 encoding an enzyme that confers resistance to a group of antibiotics including G418. The cells are seeded in alpha minus MEM supplemented with 1 mg/ml G418. After 2 days, the cells are trypsinized and seeded in hybridoma cloning plates (Greiner, Germany) in alpha minus MEM supplemented with 10, 25, or 50 ng/ml of methotrexate plus 1 mg/ml G418. After about 10-14 days single clones are trypsinized and then seeded in 6-well petri dishes or 10 ml flasks using different concentrations of methotrexate (50 μM, 100 nM, 200 nM, 400 nM, 800 nM). Clones growing at the highest concentrations of methotrexate are then transferred to new 6-well plates containing even higher concentrations of methotrexate (1 μM, 2 μM, 5 μM, 10 mM, 20 mM). The same procedure is repeated until clones are obtained which grow at a concentration of 100-200 μM. Expression of the desired gene product is analyzed, for instance, by SDS-PAGE and Western blot or by reversed phase HPLC analysis.

### Example 9

### Protein Fusions

[0970] The polypeptides of the present invention are preferably fused to other proteins. These fusion proteins can be used for a variety of applications. For example, fusion of the present polypeptides to His-tag, HA-tag, protein A, IgG domains, and maltose binding protein facilitates purification. (See Example 5; see also EP A 394,827; Traunecker, et al., Nature 331:84-86 (1988).) Similarly, fusion to IgG-1, IgG-3, and albumin increases the halflife time in vivo. Nuclear localization signals fused to the polypeptides of the present invention can target the protein to a specific subcellular localization, while covalent heterodimer or homodimers can increase or decrease the activity of a fusion protein. Fusion proteins can also create chimeric molecules having more than one function. Finally, fusion proteins can increase solubility and/or stability of the fused protein compared to the non-fused protein. All of the types of fusion proteins described above can be made by modifying the following protocol, which outlines the fusion of a polypeptide to an IgG molecule, or the protocol described in Example 5.

[0971] Briefly, the human Fc portion of the IgG molecule can be PCR amplified, using primers that span the 5′ and 3′ ends of the sequence described below. These primers also should have convenient restriction enzyme sites that will facilitate cloning into an expression vector, preferably a mammalian expression vector.

[0972] For example, if pC4 (ATCC Accession No. 209646) is used, the human Fc portion can be ligated into the BamHI cloning site. Note that the 3′ BamHI site should be destroyed. Next, the vector containing the human Fc portion is re-restricted with BamHI, linearizing the vector, and a polynucleotide of the present invention, isolated by the PCR protocol described in Example 1, is ligated into this BamHI site. Note that the polynucleotide is cloned without a stop codon, otherwise a fusion protein will not be produced.

[0973] If the naturally occurring signal sequence is used to produce the polypeptide of the present invention, pC4 does not need a second signal peptide. Alternatively, if the naturally occurring signal sequence is not used, the vector can be modified to include a heterologous signal sequence. (See, e.g., International Publication No. WO 96/34891.)

[0974] Human IgG Fc region:

(SEQ ID NO: 1)

GGGATCCGGAGCCCAAATCTTCTGACAAAACTCACACATGCCCACCGTGC
CCAGCACCTGAATTCGAGGGTGCACCGTCAGTCTTCCTCTTCCCCCCAAA
ACCCAAGGACACCCTCATGATCTCCCGGACTCCTGAGGTCACATGCGTGG
TGGTGGACGTAAGCCACGAAGACCCTGAGGTCAAGTTCAACTGGTACGTG
GACGGCGTGGAGGTGCATAATGCCAAGACAAAGCCGCGGGAGGAGCAGTA
CAACAGCACGTACCGTGTGGTCAGCGTCCTCACCGTCCTGCACCAGGACT
GGCTGAATGGCAAGGAGTACAAGTGCAAGGTCTCCAACAAAGCCCTCCCA
ACCCCCATCGAGAAAACCATCTCCAAAGCCAAAGGGCAGCCCCGAGAACC
ACAGGTGTACACCCTGCCCCCATCCCGGGATGAGCTGACCAAGAACCAGG
TCAGCCTGACCTGCCTGGTCAAAGGCTTCTATCCAAGCGACATCGCCGTG
GAGTGGGAGAGCAATGGGCAGCCGGAGAACAACTACAAGACCACGCCTCC
CGTGCTGGACTCCGACGGCTCCTTCTTCCTCTACAGCAAGCTCACCGTGG
ACAAGAGCAGGTGGCAGCAGGGGAACGTCTTCTCATGCTCCGTGATGCAT
GAGGCTCTGCACAACCACTACACGCAGAAGAGCCTCTCCCTGTCTCCGGG
TAAATGAGTGCGACGGCCGCGACTCTAGAGGAT

### Example 10

### Production of an Antibody from a Polypeptide Hybridoma Technology

[0975] The antibodies of the present invention can be prepared by a variety of methods. (See, Current Protocols, Chapter 2.) As one example of such methods, cells expressing polypeptide of the present invention are administered to an animal to induce the production of sera containing polyclonal antibodies. In a preferred method, a preparation of polypeptide of the present invention is prepared and purified to render it substantially free of natural contaminants. Such a preparation is then introduced into an animal in order to produce polyclonal antisera of greater specific activity.

[0976] Monoclonal antibodies specific for polypeptide of the present invention are prepared using hybridoma technology (Kohler et al., Nature 256:495 (1975); Kohler et al., Eur. J. Immunol. 6:511 (1976); Kohler et al., Eur. J. Immunol. 6:292 (1976); Hammerling et al., in: Monoclonal Antibodies and T-Cell Hybridomas, Elsevier, N.Y., pp. 563-681 (1981)). In general, an animal (preferably a mouse) is immunized with polypeptide of the present invention or, more preferably, with a secreted polypeptide of the present invention-expressing cell. Such polypeptide-expressing cells are cultured in any suitable tissue culture medium, preferably in Earle's modified Eagle's medium supplemented with 10% fetal bovine serum (inactivated at about 56° C.), and supplemented with about 10 g/l of nonessential amino acids, about 1,000 U/ml of penicillin, and about 100 μg/ml of streptomycin.

[0977] The splenocytes of such mice are extracted and fused with a suitable myeloma cell line. Any suitable myeloma cell line may be employed in accordance with the present invention; however, it is preferable to employ the parent myeloma cell line (SP2O), available from the ATCC. After fusion, the resulting hybridoma cells are selectively maintained in HAT medium, and then cloned by limiting dilution as described by Wands et al. (Gastroenterology 80:225-232 (1981)). The hybridoma cells obtained through such a selection are then assayed to identify clones which secrete antibodies capable of binding the polypeptide of the present invention.

[0978] Alternatively, additional antibodies capable of binding to polypeptide of the present invention can be produced in a two-step procedure using anti-idiotypic antibodies. Such a method makes use of the fact that antibodies are themselves antigens, and therefore, it is possible to obtain an antibody which binds to a second antibody. In accordance with this method, protein specific antibodies are used to immunize an animal, preferably a mouse. The splenocytes of such an animal are then used to produce hybridoma cells, and the hybridoma cells are screened to identify clones which produce an antibody whose ability to bind to the polypeptide of the present invention-specific antibody can be blocked by polypeptide of the present invention. Such antibodies comprise anti-idiotypic antibodies to the polypeptide of the present invention-specific antibody and are used to immunize an animal to induce formation of further polypeptide of the present invention-specific antibodies.

[0979] For in vivo use of antibodies in humans, an antibody is “humanized”. Such antibodies can be produced using genetic constructs derived from hybridoma cells producing the monoclonal antibodies described above. Methods for producing chimeric and humanized antibodies are known in the art and are discussed herein. (See, for review, Morrison, Science 229:1202 (1985); Oi et al., BioTechniques 4:214 (1986); Cabilly et al., U.S. Pat. No. 4,816,567; Taniguchi et al., EP 171496; Morrison et al., EP 173494; Neuberger et al., WO 8601533; Robinson et al., International Publication No. WO 8702671; Boulianne et al., Nature 312:643 (1984); Neuberger et al., Nature 314:268 (1985).)

[0980] Isolation of Antibody Fragments Directed Against Polypeptide of the Present Invention from a Library of scFvs

[0981] Naturally occurring V-genes isolated from human PBLs are constructed into a library of antibody fragments which contain reactivities against polypeptide of the present invention to which the donor may or may not have been exposed (see e.g., U.S. Pat. No. 5,885,793 incorporated herein by reference in its entirety).

[0982] Rescue of the Library. A library of scFvs is constructed from the RNA of human PBLs as described in International Publication No. WO 92/01047. To rescue phage displaying antibody fragments, approximately 10⁹ E. coli harboring the phagemid are used to inoculate 50 ml of 2×TY containing 1% glucose and 100 μg/ml of ampicillin (2×TY-AMP-GLU) and grown to an O.D. of 0.8 with shaking. Five ml of this culture is used to inoculate 50 ml of 2×TY-AMP-GLU, 2×10⁸ TU of delta gene 3 helper (M13 delta gene III, see International Publication No. WO 92/01047) are added and the culture incubated at 37° C. for 45 minutes without shaking and then at 37° C. for 45 minutes with shaking. The culture is centrifuged at 4000 r.p.m. for 10 min. and the pellet resuspended in 2 liters of 2×TY containing 100 μg/ml ampicillin and 50 ug/ml kanamycin and grown overnight. Phage are prepared as described in International Application No. WO 92/01047.

[0983] M13 delta gene III is prepared as follows: M13 delta gene III helper phage does not encode gene III protein, hence the phage(mid) displaying antibody fragments have a greater avidity of binding to antigen. Infectious Ml 3 delta gene III particles are made by growing the helper phage in cells harboring a pUC 19 derivative supplying the wild type gene III protein during phage morphogenesis. The culture is incubated for 1 hour at 37° C. without shaking and then for a further hour at 37° C. with shaking. Cells are spun down (IEC-Centra 8,400 r.p.m. for 10 min), resuspended in 300 ml 2×TY broth containing 100 μg ampicillin/ml and 25 μg kanamycin/ml (2×TY-AMP-KAN) and grown overnight, shaking at 37° C. Phage particles are purified and concentrated from the culture medium by two PEG-precipitations (Sambrook et al., 1990), resuspended in 2 ml PBS and passed through a 0.45 μm filter (Minisart NML; Sartorius) to give a final concentration of approximately 10¹³ transducing units/ml (ampicillin-resistant clones).

[0984] Panning of the Library. Immunotubes (Nunc) are coated overnight in PBS with 4 ml of either 100 μg/ml or 10 μg/ml of a polypeptide of the present invention. Tubes are blocked with 2% Marvel-PBS for 2 hours at 37° C. and then washed 3 times in PBS. Approximately 10¹³ TU of phage is applied to the tube and incubated for 30 minutes at room temperature tumbling on an over and under turntable and then left to stand for another 1.5 hours. Tubes are washed 10 times with PBS 0.1% Tween-20 and 10 times with PBS. Phage are eluted by adding 1 ml of 100 mM triethylamine and rotating 15 minutes on an under and over turntable after which the solution is immediately neutralized with 0.5 ml of 1.0M Tris-HCl, pH 7.4. Phage are then used to infect 10 ml of mid-log E. coli TG1 by incubating eluted phage with bacteria for 30 minutes at 37° C. The E. coli are then plated on TYE plates containing 1% glucose and 100 μg/ml ampicillin. The resulting bacterial library is then rescued with delta gene 3 helper phage as described above to prepare phage for a subsequent round of selection. This process is then repeated for a total of 4 rounds of affinity purification with tube-washing increased to 20 times with PBS, 0.1% Tween-20 and 20 times with PBS for rounds 3 and 4.

[0985] Characterization of Binders. Eluted phage from the 3rd and 4th rounds of selection are used to infect E. coli HB 2151 and soluble scFv is produced (Marks, et al., 1991) from single colonies for assay. ELISAs are performed with microtitre plates coated with 10 pg/ml of the polypeptide of the present invention in 50 mM bicarbonate pH 9.6. Clones positive in ELISA are further characterized by PCR fingerprinting (see, e.g., International Application No. WO 92/01047) and then by sequencing. These ELISA positive clones may also be further characterized by techniques known in the art, such as, for example, epitope mapping, binding affinity, receptor signal transduction, ability to block or competitively inhibit antibody/antigen binding, and competitive agonistic or antagonistic activity.

### Example 11

### Method of Determining Alterations in a Gene Corresponding to a Polynucleotide

[0986] RNA isolated from entire families or individual patients presenting with a phenotype of interest (such as a disease) is isolated. cDNA is then generated from these RNA samples using protocols known in the art. (See, Sambrook.) The cDNA is then used as a template for PCR, employing primers surrounding regions of interest in SEQ ID NO:X; and/or the nucleotide sequence of the cDNA contained in Clone ID NO:Z. Suggested PCR conditions consist of 35 cycles at 95 degrees C. for 30 seconds; 60-120 seconds at 52-58 degrees C.; and 60-120 seconds at 70 degrees C., using buffer solutions described in Sidransky et al., Science 252:706 (1991).

[0987] PCR products are then sequenced using primers labeled at their 5′ end with T4 polynucleotide kinase, employing SequiTherm Polymerase (Epicentre Technologies). The intron-exon boundaries of selected exons is also determined and genomic PCR products analyzed to confirm the results. PCR products harboring suspected mutations are then cloned and sequenced to validate the results of the direct sequencing.

[0988] PCR products are cloned into T-tailed vectors as described in Holton et al., Nucleic Acids Research, 19:1156 (1991) and sequenced with T7 polymerase (United States Biochemical). Affected individuals are identified by mutations not present in unaffected individuals.

[0989] Genomic rearrangements are also observed as a method of determining alterations in a gene corresponding to a polynucleotide. Genomic clones isolated according to Example 2 are nick-translated with digoxigenindeoxy-uridine 5′-triphosphate (Boehringer Manheim), and FISH performed as described in Johnson et al., Methods Cell Biol. 35:73-99 (1991). Hybridization with the labeled probe is carried out using a vast excess of human cot-1 DNA for specific hybridization to the corresponding genomic locus.

[0990] Chromosomes are counterstained with 4,6-diamino-2-phenylidole and propidium iodide, producing a combination of C- and R-bands. Aligned images for precise mapping are obtained using a triple-band filter set (Chroma Technology, Brattleboro, Vt.) in combination with a cooled charge-coupled device camera (Photometrics, Tucson, Ariz.) and variable excitation wavelength filters. (Johnson et al., Genet. Anal. Tech. Appl., 8:75 (1991).) Image collection, analysis and chromosomal fractional length measurements are performed using the ISee Graphical Program System. (Inovision Corporation, Durham, N.C.) Chromosome alterations of the genomic region hybridized by the probe are identified as insertions, deletions, and translocations. These alterations are used as a diagnostic marker for an associated disease.

### Example 12

### Method of Detecting Abnormal Levels of a Polypeptide in a Biological Sample

[0991] A polypeptide of the present invention can be detected in a biological sample, and if an increased or decreased level of the polypeptide is detected, this polypeptide is a marker for a particular phenotype. Methods of detection are numerous, and thus, it is understood that one skilled in the art can modify the following assay to fit their particular needs.

[0992] For example, antibody-sandwich ELISAs are used to detect polypeptides in a sample, preferably a biological sample. Wells of a microtiter plate are coated with specific antibodies, at a final concentration of 0.2 to 10 ug/ml. The antibodies are either monoclonal or polyclonal and are produced by the method described in Example 10. The wells are blocked so that non-specific binding of the polypeptide to the well is reduced.

[0993] The coated wells are then incubated for >2 hours at RT with a sample containing the polypeptide. Preferably, serial dilutions of the sample should be used to validate results. The plates are then washed three times with deionized or distilled water to remove unbound polypeptide.

[0994] Next, 50 ul of specific antibody-alkaline phosphatase conjugate, at a concentration of 25-400 ng, is added and incubated for 2 hours at room temperature. The plates are again washed three times with deionized or distilled water to remove unbound conjugate.

[0995] Add 75 ul of 4-methylumbelliferyl phosphate (MUP) or p-nitrophenyl phosphate (NPP) substrate solution to each well and incubate 1 hour at room temperature. Measure the reaction by a microtiter plate reader. Prepare a standard curve, using serial dilutions of a control sample, and plot polypeptide concentration on the X-axis (log scale) and fluorescence or absorbance of the Y-axis (linear scale). Interpolate the concentration of the polypeptide in the sample using the standard curve.

### Example 13

### Formulation

[0996] The invention also provides methods of treatment and/or prevention of diseases or disorders (such as, for example, any one or more of the diseases or disorders disclosed herein) by administration to a subject of an effective amount of a Therapeutic. By therapeutic is meant polynucleotides or polypeptides of the invention (including fragments and variants), agonists or antagonists thereof, and/or antibodies thereto, in combination with a pharmaceutically acceptable carrier type (e.g., a sterile carrier).

[0997] The Therapeutic will be formulated and dosed in a fashion consistent with good medical practice, taking into account the clinical condition of the individual patient (especially the side effects of treatment with the Therapeutic alone), the site of delivery, the method of administration, the scheduling of administration, and other factors known to practitioners. The “effective amount” for purposes herein is thus determined by such considerations.

[0998] As a general proposition, the total pharmaceutically effective amount of the Therapeutic administered parenterally per dose will be in the range of about lug/kg/day to 10 mg/kg/day of patient body weight, although, as noted above, this will be subject to therapeutic discretion. More preferably, this dose is at least 0.01 mg/kg/day, and most preferably for humans between about 0.01 and 1 mg/kg/day for the hormone. If given continuously, the Therapeutic is typically administered at a dose rate of about 1 ug/kg/hour to about 50 ug/kg/hour, either by 1-4 injections per day or by continuous subcutaneous infusions, for example, using a mini-pump. An intravenous bag solution may also be employed. The length of treatment needed to observe changes and the interval following treatment for responses to occur appears to vary depending on the desired effect.

[0999] Therapeutics can be are administered orally, rectally, parenterally, intracistemally, intravaginally, intraperitoneally, topically (as by powders, ointments, gels, drops or transdermal patch), bucally, or as an oral or nasal spray. “Pharmaceutically acceptable carrier” refers to a non-toxic solid, semisolid or liquid filler, diluent, encapsulating material or formulation auxiliary of any. The term “parenteral” as used herein refers to modes of administration which include intravenous, intramuscular, intraperitoneal, intrasternal, subcutaneous and intraarticular injection and infusion.

[1000] Therapeutics of the invention are also suitably administered by sustained-release systems. Suitable examples of sustained-release Therapeutics are administered orally, rectally, parenterally, intracistemally, intravaginally, intraperitoneally, topically (as by powders, ointments, gels, drops or transdermal patch), bucally, or as an oral or nasal spray. “Pharmaceutically acceptable carrier” refers to a non-toxic solid, semisolid or liquid filler, diluent, encapsulating material or formulation auxiliary of any type. The term “parenteral” as used herein refers to modes of administration which include intravenous, intramuscular, intraperitoneal, intrasternal, subcutaneous and intraarticular injection and infusion.

[1001] Therapeutics of the invention are also suitably administered by sustained-release systems. Suitable examples of sustained-release Therapeutics include suitable polymeric materials (such as, for example, semi-permeable polymer matrices in the form of shaped articles, e.g., films, or mirocapsules), suitable hydrophobic materials (for example as an emulsion in an acceptable oil) or ion exchange resins, and sparingly soluble derivatives (such as, for example, a sparingly soluble salt).

[1002] Sustained-release matrices include polylactides (U.S. Pat. No. 3,773,919, EP 58,481), copolymers of L-glutamic acid and gamma-ethyl-L-glutamate (Sidman et al., Biopolymers 22:547-556 (1983)), poly (2-hydroxyethyl methacrylate) (Langer et al., J. Biomed. Mater. Res. 15:167-277 (1981), and Langer, Chem. Tech. 12:98-105 (1982)), ethylene vinyl acetate (Langer et al., Id.) or poly-D-(−)-3-hydroxybutyric acid (EP 133,988).

[1003] Sustained-release Therapeutics also include liposomally entrapped Therapeutics of the invention (see generally, Langer, Science 249:1527-1533 (1990); Treat et al., in Liposomes in the Therapy of Infectious Disease and Cancer, Lopez-Berestein and Fidler (eds.), Liss, New York, pp. 317-327 and 353-365 (1989)). Liposomes containing the Therapeutic are prepared by methods known per se: DE 3,218,121; Epstein et al., Proc. Natl. Acad. Sci. (USA) 82:3688-3692 (1985); Hwang et al., Proc. Natl. Acad. Sci.(USA) 77:4030-4034 (1980); EP 52,322; EP 36,676; EP 88,046; EP 143,949; EP 142,641; Japanese Pat. Appl. 83-118008; U.S. Pat. Nos. 4,485,045 and 4,544,545; and EP 102,324. Ordinarily, the liposomes are of the small (about 200-800 Angstroms) unilamellar type in which the lipid content is greater than about 30 mol. percent cholesterol, the selected proportion being adjusted for the optimal Therapeutic.

[1004] In yet an additional embodiment, the Therapeutics of the invention are delivered by way of a pump (see Langer, supra; Sefton, CRC Crit. Ref. Biomed. Eng. 14:201 (1987); Buchwald et al., Surgery 88:507 (1980); Saudek et al., N. Engl. J. Med. 321:574 (1989)).

[1005] Other controlled release systems are discussed in the review by Langer (Science 249:1527-1533 (1990)).

[1006] For parenteral administration, in one embodiment, the Therapeutic is formulated generally by mixing it at the desired degree of purity, in a unit dosage injectable form (solution, suspension, or emulsion), with a pharmaceutically acceptable carrier, i.e., one that is non-toxic to recipients at the dosages and concentrations employed and is compatible with other ingredients of the formulation. For example, the formulation preferably does not include oxidizing agents and other compounds that are known to be deleterious to the Therapeutic.

[1007] Generally, the formulations are prepared by contacting the Therapeutic uniformly and intimately with liquid carriers or finely divided solid carriers or both. Then, if necessary, the product is shaped into the desired formulation. Preferably the carrier is a parenteral carrier, more preferably a solution that is isotonic with the blood of the recipient. Examples of such carrier vehicles include water, saline, Ringer's solution, and dextrose solution. Non-aqueous vehicles such as fixed oils and ethyl oleate are also useful herein, as well as liposomes.

[1008] The carrier suitably contains minor amounts of additives such as substances that enhance isotonicity and chemical stability. Such materials are non-toxic to recipients at the dosages and concentrations employed, and include buffers such as phosphate, citrate, succinate, acetic acid, and other organic acids or their salts; antioxidants such as ascorbic acid; low molecular weight (less than about ten residues) polypeptides, e.g., polyarginine or tripeptides; proteins, such as serum albumin, gelatin, or immunoglobulins; hydrophilic polymers such as polyvinylpyrrolidone; amino acids, such as glycine, glutamic acid, aspartic acid, or arginine; monosaccharides, disaccharides, and other carbohydrates including cellulose or its derivatives, glucose, manose, or dextrins; chelating agents such as EDTA; sugar alcohols such as mannitol or sorbitol; counterions such as sodium; and/or nonionic surfactants such as polysorbates, poloxamers, or PEG.

[1009] The Therapeutic is typically formulated in such vehicles at a concentration of about 0.1 mg/ml to 100 mg/ml, preferably 1-10 mg/ml, at a pH of about 3 to 8. It will be understood that the use of certain of the foregoing excipients, carriers, or stabilizers will result in the formation of polypeptide salts.

[1010] Any pharmaceutical used for therapeutic administration can be sterile. Sterility is readily accomplished by filtration through sterile filtration membranes (e.g., 0.2 micron membranes). Therapeutics generally are placed into a container having a sterile access port, for example, an intravenous solution bag or vial having a stopper pierceable by a hypodermic injection needle.

[1011] Therapeutics ordinarily will be stored in unit or multi-dose containers, for example, sealed ampoules or vials, as an aqueous solution or as a lyophilized formulation for reconstitution. As an example of a lyophilized formulation, 10-ml vials are filled with 5 ml of sterile-filtered 1% (w/v) aqueous Therapeutic solution, and the resulting mixture is lyophilized. The infusion solution is prepared by reconstituting the lyophilized Therapeutic using bacteriostatic Water-for-Injection.

[1012] The invention also provides a pharmaceutical pack or kit comprising one or more containers filled with one or more of the ingredients of the Therapeutics of the invention. Associated with such container(s) can be a notice in the form prescribed by a governmental agency regulating the manufacture, use or sale of pharmaceuticals or biological products, which notice reflects approval by the agency of manufacture, use or sale for human administration. In addition, the Therapeutics may be employed in conjunction with other therapeutic compounds.

[1013] The Therapeutics of the invention may be administered alone or in combination with adjuvants. Adjuvants that may be administered with the Therapeutics of the invention include, but are not limited to, alum, alum plus deoxycholate (ImmunoAg), MTP-PE (Biocine Corp.), QS21 (Genentech, Inc.), BCG (e.g., THERACYS®), MPL and nonviable prepartions of Corynebacterium parvum. In a specific embodiment, Therapeutics of the invention are administered in combination with alum. In another specific embodiment, Therapeutics of the invention are administered in combination with QS-21. Further adjuvants that may be administered with the Therapeutics of the invention include, but are not limited to, Monophosphoryl lipid immunomodulator, AdjuVax 100a, QS-21, QS-18, CRL1005, Aluminum salts, MF-59, and Virosomal adjuvant technology. Vaccines that may be administered with the Therapeutics of the invention include, but are not limited to, vaccines directed toward protection against MMR (measles, mumps, rubella), polio, varicella, tetanus/diptheria, hepatitis A, hepatitis B, haemophilus influenzae B, whooping cough, pneumonia, influenza, Lyme's Disease, rotavirus, cholera, yellow fever, Japanese encephalitis, poliomyelitis, rabies, typhoid fever, and pertussis. Combinations may be administered either concomitantly, e.g., as an admixture, separately but simultaneously or concurrently; or sequentially. This includes presentations in which the combined agents are administered together as a therapeutic mixture, and also procedures in which the combined agents are administered separately but simultaneously, e.g., as through separate intravenous lines into the same individual. Administration “in combination” further includes the separate administration of one of the compounds or agents given first, followed by the second.

[1014] The Therapeutics of the invention may be administered alone or in combination with other therapeutic agents. Therapeutic agents that may be administered in combination with the Therapeutics of the invention, include but not limited to, chemotherapeutic agents, antibiotics, steroidal and non-steroidal anti-inflammatories, conventional immunotherapeutic agents, and/or therapeutic treatments described below. Combinations may be administered either concomitantly, e.g., as an admixture, separately but simultaneously or concurrently; or sequentially. This includes presentations in which the combined agents are administered together as a therapeutic mixture, and also procedures in which the combined agents are administered separately but simultaneously, e.g., as through separate intravenous lines into the same individual. Administration “in combination” further includes the separate administration of one of the compounds or agents given first, followed by the second.

[1015] In certain embodiments, Therapeutics of the invention are administered in combination with antiretroviral agents, nucleoside/nucleotide reverse transcriptase inhibitors (NRTIs), non-nucleoside reverse transcriptase inhibitors (NNRTIs), and/or protease inhibitors (PIs). NRTIs that may be administered in combination with the Therapeutics of the invention, include, but are not limited to, RETROVIR™ (zidovudine/AZT), VIDEX™ (didanosine/ddI), HIVID™ (zalcitabine/ddC), ZERIT™ (stavudine/d4T), EPIVIR™ (lamivudine/3TC), and COMBIVIR™ (zidovudine/lamivudine). NNRTIs that may be administered in combination with the Therapeutics of the invention, include, but are not limited to, VIRAMUNE™ (nevirapine), RESCRIPTOR™ (delavirdine), and SUSTIVA™ (efavirenz). Protease inhibitors that may be administered in combination with the Therapeutics of the invention, include, but are not limited to, CRIXIVAN™ (indinavir), NORVIR™ (ritonavir), INVIRASE™ (saquinavir), and VIRACEPT™ (nelfinavir). In a specific embodiment, antiretroviral agents, nucleoside reverse transcriptase inhibitors, non-nucleoside reverse transcriptase inhibitors, and/or protease inhibitors may be used in any combination with Therapeutics of the invention to treat AIDS and/or to prevent or treat HIV infection.

[1016] Additional NRTIs include LODENOSINE™ (F-ddA; an acid-stable adenosine NRTI; Triangle/Abbott; COVIRACIL™ (emtricitabine/FTC; structurally related to lamivudine (3TC) but with 3- to 10-fold greater activity in vitro; TrianglelAbbott); dOTC (BCH-10652, also structurally related to lamivudine but retains activity against a substantial proportion of lamivudine-resistant isolates; Biochem Pharma); Adefovir (refused approval for anti-HIV therapy by FDA; Gilead Sciences); PREVEON® (Adefovir Dipivoxil, the active prodrug of adefovir; its active form is PMEA-pp); TENOFOVIR™ (bis-POC PMPA, a PMPA prodrug; Gilead); DAPD/DXG (active metabolite of DAPD; Triangle/Abbott); D-D4FC (related to 3TC, with activity against AZT/3TC-resistant virus); GW420867X (Glaxo Wellcome); ZIAGEN™ (abacavir/159U89; Glaxo Wellcome Inc.); CS-87 (3′azido-2′,3′-dideoxyuridine; WO 99/66936); and S-acyl-2-thioethyl (SATE)-bearing prodrug forms of β-L-FD4C and β-L-FddC (WO 98/17281).

[1017] Additional NNRTIs include COACTINON” (Emivirine/MKC-442, potent NNRTI of the HEPT class; Triangle/Abbott); CAPRAVIRINE” (AG-1549/S-1153, a next generation NNRTI with activity against viruses containing the K103N mutation; Agouron); PNU-142721 (has 20- to 50-fold greater activity than its predecessor delavirdine and is active against K103N mutants; Pharmacia & Upjohn); DPC-961 and DPC-963 (second-generation derivatives of efavirenz, designed to be active against viruses with the K103N mutation; DuPont); GW-420867×(has 25-fold greater activity than HBY097 and is active against K103N mutants; Glaxo Wellcome); CALANOLIDE A (naturally occurring agent from the latex tree; active against viruses containing either or both the Y181C and K103N mutations); and Propolis (WO 99/49830).

[1018] Additional protease inhibitors include LOPINAVIR™ (ABT378/r; Abbott Laboratories); BMS-232632 (an azapeptide; Bristol-Myres Squibb); TIPRANAVIR™ (PNU-140690, a non-peptic dihydropyrone; Pharmacia & Upjohn); PD-178390 (a nonpeptidic dihydropyrone; Parke-Davis); BMS 232632 (an azapeptide; Bristol-Myers Squibb); L-756,423 (an indinavir analog; Merck); DMP-450 (a cyclic urea compound; Avid & DuPont); AG-1776 (a peptidomimetic with in vitro activity against protease inhibitor-resistant viruses; Agouron); VX-175/GW-433908 (phosphate prodrug of amprenavir; Vertex & Glaxo Welcome); CGP61755 (Ciba); and AGENERASE™ (amprenavir; Glaxo Wellcome Inc.).

[1019] Additional antiretroviral agents include fusion inhibitors/gp4l binders. Fusion inhibitors/gp41 binders include T-20 (a peptide from residues 643-678 of the HIV gp41 transmembrane protein ectodomain which binds to gp41 in its resting state and prevents transformation to the fusogenic state; Trimeris) and T-1249 (a second-generation fusion inhibitor; Trimeris).

[1020] Additional antiretroviral agents include fusion inhibitors/chemokine receptor antagonists. Fusion inhibitors/chemokine receptor antagonists include CXCR4 antagonists such as AMD 3100 (a bicyclam), SDF-1 and its analogs, and ALX40-4C (a cationic peptide), T22 (an 18 amino acid peptide; Trimeris) and the T22 analogs T134 and T140; CCR5 antagonists such as RANTES (9-68), AOP-RANTES, NNY-RANTES, and TAK-779; and CCR5/CXCR4 antagonists such as NSC 651016 (a distamycin analog). Also included are CCR2B, CCR3, and CCR6 antagonists. Chemokine recpetor agonists such as RANTES, SDF-1, MIP-1α, MIP-1β, etc., may also inhibit fusion.

[1021] Additional antiretroviral agents include integrase inhibitors. Integrase inhibitors include dicaffeoylquinic (DFQA) acids; L-chicoric acid (a dicaffeoyltartaric (DCTA) acid); quinalizarin (QLC) and related anthraquinones; ZINTEVIR™ (AR 177, an oligonucleotide that probably acts at cell surface rather than being a true integrase inhibitor; Arondex); and naphthols such as those disclosed in WO 98/50347.

[1022] Additional antiretroviral agents include hydroxyurea-like compunds such as BCX-34 (a purine nucleoside phosphorylase inhibitor; Biocryst); ribonucleotide reductase inhibitors such as DIDOX™ (Molecules for Health); inosine monophosphate dehydrogenase (IMPDH) inhibitors sucha as VX-497 (Vertex); and myvopholic acids such as CellCept (mycophenolate mofetil; Roche).

[1023] Additional antiretroviral agents include inhibitors of viral integrase, inhibitors of viral genome nuclear translocation such as arylene bis(methylketone) compounds; inhibitors of HIV entry such as AOP-RANTES, NNY-RANTES, RANTES-IgG fusion protein, soluble complexes of RANTES and glycosaminoglycans (GAG), and AMD-3100; nucleocapsid zinc finger inhibitors such as dithiane compounds; targets of HIV Tat and Rev; and pharmacoenhancers such as ABT-378.

[1024] Other antiretroviral therapies and adjunct therapies include cytokines and lymphokines such as MIP-1α, MIP-1β, SDF-1α, IL-2, PROLEUKIN™ (aldesleukin/L2-7001; Chiron), IL-4, IL-10, IL-12, and IL-13; interferons such as IFN-α2a; antagonists of TNFs, NFκB, GM-CSF, M-CSF, and IL-10; agents that modulate immune activation such as cyclosporin and prednisone; vaccines such as Remune™ (HIV Immunogen), APL 400-003 (Apollon), recombinant gp120 and fragments, bivalent (B/E) recombinant envelope glycoprotein, rgp120CM235, MN rgp120, SF-2 rgp120, gp120/soluble CD4 complex, Delta JR-FL protein, branched synthetic peptide derived from discontinuous gp120 C3/C4 domain, fusion-competent immunogens, and Gag, Pol, Nef, and Tat vaccines; gene-based therapies such as genetic suppressor elements (GSEs; WO 98/54366), and intrakines (genetically modified CC chemokines targetted to the ER to block surface expression of newly synthesized CCR5 (Yang et al., PNAS 94:11567-72 (1997); Chen et al., Nat. Med. 3:1110-16 (1997)); antibodies such as the anti-CXCR4 antibody 12G5, the anti-CCR5 antibodies 2D7, 5C7, PA8, PA9, PA10, PA11, PA12, and PA14, the anti-CD4 antibodies Q4120 and RPA-T4, the anti-CCR3 antibody 7B11, the anti-gp120 antibodies 17b, 48d, 447-52D, 257-D, 268-D and 50.1, anti-Tat antibodies, anti-TNF-α antibodies, and monoclonal antibody 33A; aryl hydrocarbon (AH) receptor agonists and antagonists such as TCDD, 3,3′,4,4′,5-pentachlorobiphenyl, 3,3′,4,4′-tetrachlorobiphenyl, and α-naphthoflavone (WO 98/30213); and antioxidants such as γ-L-glutamyl-L-cysteine ethyl ester (γ-GCE; WO 99/56764).

[1025] In a further embodiment, the Therapeutics of the invention are administered in combination with an antiviral agent. Antiviral agents that may be administered with the Therapeutics of the invention include, but are not limited to, acyclovir, ribavirin, amantadine, and remantidine.

[1026] In other embodiments, Therapeutics of the invention may be administered in combination with anti-opportunistic infection agents. Anti-opportunistic agents that may be administered in combination with the Therapeutics of the invention, include, but are not limited to, TRIMETHOPRIM-SULFAMETHOXAZOLE™, DAPSONE™, PENTAMIDINE™, ATOVAQUONE™, ISONIAZID™, RIFAMPIN™, PYRAZINAMIDE™, ETHAMBUTOL™, RIFABUTIN™, CLARITHROMYCIN™, AZITHROMYCIN™, GANCICLOVIR™, FOSCARNET™, CIDOFOVIR™, FLUCONAZOLE™, ITRACONAZOLE™, KETOCONAZOLE™, ACYCLOVIR™, FAMCICOLVIR™, PYRIMETHAMINE™, LEUCOVORIN™, NEUPOGEN™ (filgrastim/G-CSF), and LEUKINE™ (sargramostim/GM-CSF). In a specific embodiment, Therapeutics of the invention are used in any combination with TRIMETHOPRIM-SULFAMETHOXAZOLE™, DAPSONE™, PENTAMIDINE™, and/or ATOVAQUONE™ to prophylactically treat or prevent an opportunistic Pneumocystis carinii pneumonia infection. In another specific embodiment, Therapeutics of the invention are used in any combination with ISONIAZID™, RIFAMPIN™, PYRAZINAMIDE™, and/or ETHAMBUTOL™ to prophylactically treat or prevent an opportunistic Mycobacterium avium complex infection. In another specific embodiment, Therapeutics of the invention are used in any combination with RIFABUTIN™, CLARITHROMYCIN™, and/or AZITHROMYCIN™ to prophylactically treat or prevent an opportunistic Mycobacterium tuberculosis infection. In another specific embodiment, Therapeutics of the invention are used in any combination with GANCICLOVIR™, FOSCARNET™, and/or CIDOFOVIR™ to prophylactically treat or prevent an opportunistic cytomegalovirus infection. In another specific embodiment, Therapeutics of the invention are used in any combination with FLUCONAZOLE™, ITRACONAZOLE™, and/or KETOCONAZOLE™ to prophylactically treat or prevent an opportunistic fungal infection. In another specific embodiment, Therapeutics of the invention are used in any combination with ACYCLOVIR™ and/or FAMCICOLVIR™ to prophylactically treat or prevent an opportunistic herpes simplex virus type I and/or type II infection. In another specific embodiment, Therapeutics of the invention are used in any combination with PYRIMETHAMINE™ and/or LEUCOVORIN™ to prophylactically treat or prevent an opportunistic Toxoplasma gondii infection. In another specific embodiment, Therapeutics of the invention are used in any combination with LEUCOVORIN™ and/or NEUPOGEN™ to prophylactically treat or prevent an opportunistic bacterial infection.

[1027] In a further embodiment, the Therapeutics of the invention are administered in combination with an antibiotic agent. Antibiotic agents that may be administered with the Therapeutics of the invention include, but are not limited to, amoxicillin, beta-lactamases, aminoglycosides, beta-lactam (glycopeptide), beta-lactamases, Clindamycin, chloramphenicol, cephalosporins, ciprofloxacin, ciprofloxacin, erythromycin, fluoroquinolones, macrolides, metronidazole, penicillins, quinolones, rapamycin, rifampin, streptomycin, sulfonamide, tetracyclines, trimethoprim, trimethoprim-sulfamthoxazole, and vancomycin.

[1028] In other embodiments, Therapeutics of the invention are administered in combination with immunosuppressive agents. Immunosuppressive agents that may be administered in combination with the Therapeutics of the invention include, but are not limited to, steroids, cyclosporine, cyclosporine analogs, cyclophosphamide methylprednisone, prednisone, azathioprine, FK-506, 15-deoxyspergualin, and other immunosuppressive agents that act by suppressing the function of responding T cells. Other immunosuppressive agents that may be administered in combination with the Therapeutics of the invention include, but are not limited to, prednisolone, methotrexate, thalidomide, methoxsalen, rapamycin, leflunomide, mizoribine (BREDININ™), brequinar, deoxyspergualin, and azaspirane (SKF 105685), ORTHOCLONE OKT® 3 (muromonab-CD3), SANDIMMUNE™, NEORAL™, SANGDYA™ (cyclosporine), PROGRAF® (FK506, tacrolimus), CELLCEPT® (mycophenolate motefil, of which the active metabolite is mycophenolic acid), IMURAN™ (azathioprine), glucocorticosteroids, adrenocortical steroids such as DELTASONE™ (prednisone) and HYDELTRASOL™ (prednisolone), FOLEX™ and MEXATE™ (methotrxate), OXSORALEN-ULTRA™ (methoxsalen) and RAPAMUNE™ (sirolimus). In a specific embodiment, immunosuppressants may be used to prevent rejection of organ or bone marrow transplantation.

[1029] In an additional embodiment, Therapeutics of the invention are administered alone or in combination with one or more intravenous immune globulin preparations. Intravenous immune globulin preparations that may be administered with the Therapeutics of the invention include, but not limited to, GAMMAR™, IVEEGAM™, SANDOGLOBULIN™, GAMMAGARD S/D™, ATGAM™ (antithymocyte glubulin), and GAMIMUNE™. In a specific embodiment, Therapeutics of the invention are administered in combination with intravenous immune globulin preparations in transplantation therapy (e.g., bone marrow transplant).

[1030] In certain embodiments, the Therapeutics of the invention are administered alone or in combination with an anti-inflammatory agent. Anti-inflammatory agents that may be administered with the Therapeutics of the invention include, but are not limited to, corticosteroids (e.g. betamethasone, budesonide, cortisone, dexamethasone, hydrocortisone, methylprednisolone, prednisolone, prednisone, and triamcinolone), nonsteroidal anti-inflammatory drugs (e.g., diclofenac, diflunisal, etodolac, fenoprofen, floctafenine, flurbiprofen, ibuprofen, indomethacin, ketoprofen, meclofenamate, mefenamic acid, meloxicam, nabumetone, naproxen, oxaprozin, phenylbutazone, piroxicam, sulindac, tenoxicam, tiaprofenic acid, and tolmetin.), as well as antihistamines, aminoarylcarboxylic acid derivatives, arylacetic acid derivatives, arylbutyric acid derivatives, arylcarboxylic acids, arylpropionic acid derivatives, pyrazoles, pyrazolones, salicylic acid derivatives, thiazinecarboxamides, e-acetamidocaproic acid, S-adenosylmethionine, 3-amino-4-hydroxybutyric acid, amixetrine, bendazac, benzydamine, bucolome, difenpiramide, ditazol, emorfazone, guaiazulene, nabumetone, nimesulide, orgotein, oxaceprol, paranyline, perisoxal, pifoxime, proquazone, proxazole, and tenidap.

[1031] In an additional embodiment, the compositions of the invention are administered alone or in combination with an anti-angiogenic agent. Anti-angiogenic agents that may be administered with the compositions of the invention include, but are not limited to, Angiostatin (Entremed, Rockville, Md.), Troponin-1 (Boston Life Sciences, Boston, Mass.), anti-Invasive Factor, retinoic acid and derivatives thereof, paclitaxel (Taxol), Suramin, Tissue Inhibitor of Metalloproteinase-1, Tissue Inhibitor of Metalloproteinase-2, VEGI, Plasminogen Activator Inhibitor-1, Plasminogen Activator Inhibitor-2, and various forms of the lighter “d group” transition metals.

[1032] Lighter “d group” transition metals include, for example, vanadium, molybdenum, tungsten, titanium, niobium, and tantalum species. Such transition metal species may form transition metal complexes. Suitable complexes of the above-mentioned transition metal species include oxo transition metal complexes.

[1033] Representative examples of vanadium complexes include oxo vanadium complexes such as vanadate and vanadyl complexes. Suitable vanadate complexes include metavanadate and orthovanadate complexes such as, for example, ammonium metavanadate, sodium metavanadate, and sodium orthovanadate. Suitable vanadyl complexes include, for example, vanadyl acetylacetonate and vanadyl sulfate including vanadyl sulfate hydrates such as vanadyl sulfate mono- and trihydrates.

[1034] Representative examples of tungsten and molybdenum complexes also include oxo complexes. Suitable oxo tungsten complexes include tungstate and tungsten oxide complexes. Suitable tungstate complexes include ammonium tungstate, calcium tungstate, sodium tungstate dihydrate, and tungstic acid. Suitable tungsten oxides include tungsten (IV) oxide and tungsten (VI) oxide. Suitable oxo molybdenum complexes include molybdate, molybdenum oxide, and molybdenyl complexes. Suitable molybdate complexes include ammonium molybdate and its hydrates, sodium molybdate and its hydrates, and potassium molybdate and its hydrates. Suitable molybdenum oxides include molybdenum (VI) oxide, molybdenum (VI) oxide, and molybdic acid. Suitable molybdenyl complexes include, for example, molybdenyl acetylacetonate. Other suitable tungsten and molybdenum complexes include hydroxo derivatives derived from, for example, glycerol, tartaric acid, and sugars.

[1035] A wide variety of other anti-angiogenic factors may also be utilized within the context of the present invention. Representative examples include, but are not limited to, platelet factor 4; protamine sulphate; sulphated chitin derivatives (prepared from queen crab shells), (Murata et al., Cancer Res. 51:22-26, (1991)); Sulphated Polysaccharide Peptidoglycan Complex (SP-PG) (the function of this compound may be enhanced by the presence of steroids such as estrogen, and tamoxifen citrate); Staurosporine; modulators of matrix metabolism, including for example, proline analogs, cishydroxyproline, d,L-3,4-dehydroproline, Thiaproline, alpha,alpha-dipyridyl, aminopropionitrile fumarate; 4-propyl-5-(4-pyridinyl)-2(3H)-oxazolone; Methotrexate; Mitoxantrone; Heparin; Interferons; 2 Macroglobulin-serum; ChIMP-3 (Pavloff et al., J. Bio. Chem. 267:17321-17326, (1992)); Chymostatin (Tomkinson et al., Biochem J. 286:475-480, (1992)); Cyclodextrin Tetradecasulfate; Eponemycin; Camptothecin; Fumagillin (Ingber et al., Nature 348:555-557, (-1990)); Gold Sodium Thiomalate (“GST”; Matsubara and Ziff, J. Clin. Invest. 79:1440-1446, (1987)); anticollagenase-serum; alpha2-antiplasmin (Holmes et al., J. Biol. Chem. 262(4):1659-1664, (1987)); Bisantrene (National Cancer Institute); Lobenzarit disodium (N-(2)-carboxyphenyl-4-chloroanthronilic acid clisodium or “CCA”; (Takeuchi et al., Agents Actions 36:312-316, (1992)); and metalloproteinase inhibitors such as BB94.

[1036] Additional anti-angiogenic factors that may also be utilized within the context of the present invention include Thalidomide, (Celgene, Warren, N.J.); Angiostatic steroid; AGM-1470 (H. Brem and J. Folkman J Pediatr. Surg. 28:445-51 (1993)); an integrin alpha v beta 3 antagonist (C. Storgard et al., J. Clin. Invest. 103:47-54 (1999)); carboxynaminolmidazole; Carboxyamidotriazole (CAI) (National Cancer Institute, Bethesda, Md.); Conbretastatin A-4 (CA4P) (OXiGENE, Boston, Mass.); Squalamine (Magainin Pharmaceuticals, Plymouth Meeting, PA); TNP-470, (Tap Pharmaceuticals, Deerfield, Ill.); ZD-0101 AstraZeneca (London, UK); APRA (CT2584); Benefin, Byrostatin-1 (SC339555); CGP-41251 (PKC 412); CM101; Dexrazoxane (ICRF187); DMXAA; Endostatin; Flavopridiol; Genestein; GTE; ImmTher; Iressa (ZD1839); Octreotide (Somatostatin); Panretin; Penacillamine; Photopoint; PI-88; Prinomastat (AG-3340) Purlytin; Suradista (FCE26644); Tamoxifen (Nolvadex); Tazarotene; Tetrathiomolybdate; Xeloda (Capecitabine); and 5-Fluorouracil.

[1037] Anti-angiogenic agents that may be administed in combination with the compounds of the invention may work through a variety of mechanisms including, but not limited to, inhibiting proteolysis of the extracellular matrix, blocking the function of endothelial cell-extracellular matrix adhesion molecules, by antagonizing the function of angiogenesis inducers such as growth factors, and inhibiting integrin receptors expressed on proliferating endothelial cells. Examples of anti-angiogenic inhibitors that interfere with extracellular matrix proteolysis and which may be administered in combination with the compositons of the invention include, but are not lmited to, AG-3340 (Agouron, La Jolla, Calif.), BAY-12-9566 (Bayer, West Haven, Conn.), BMS-275291 (Bristol Myers Squibb, Princeton, N.J.), CGS-27032A (Novartis, East Hanover, N.J.), Marimastat (British Biotech, Oxford, UK), and Metastat (Aetema, St-Foy, Quebec). Examples of anti-angiogenic inhibitors that act by blocking the function of endothelial cell-extracellular matrix adhesion molecules and which may be administered in combination with the compositons of the invention include, but are not Imited to, EMD-121974 (Merck KcgaA Darmstadt, Germany) and Vitaxin (Ixsys, La Jolla, Calif./Medimmune, Gaithersburg, Md.). Examples of anti-angiogenic agents that act by directly antagonizing or inhibiting angiogenesis inducers and which may be administered in combination with the compositons of the invention include, but are not lmited to, Angiozy-me (Ribozyme, Boulder, Colo.), Anti-VEGF antibody (Genentech, S. San Francisco, Calif.), PTK-787/ZK-225846 (Novartis, Basel, Switzerland), SU-101 (Sugen, S. San Francisco, Calif.), SU-5416 (Sugenl Pharmacia Upjohn, Bridgewater, N.J.), and SU-6668 (Sugen). Other anti-angiogenic agents act to indirectly inhibit angiogenesis. Examples of indirect inhibitors of angiogenesis which may be administered in combination with the compositons of the invention include, but are not limited to, IM-862 (Cytran, Kirkland, Wash.), Interferon-alpha, IL-12 (Roche, Nutley, N.J.), and Pentosan polysulfate (Georgetown University, Washington, D.C.).

[1038] In particular embodiments, the use of compositions of the invention in combination with anti-angiogenic agents is contemplated for the treatment, prevention, and/or amelioration of an autoimmune disease, such as for example, an autoimmune disease described herein.

[1039] In a particular embodiment, the use of compositions of the invention in combination with anti-angiogenic agents Ls contemplated for the treatment, prevention, and/or amelioration of arthritis. In a more particular embodiment, the use of compositions of the invention in combination with anti-angiogenic agents is contemplated for the treatment, prevention, and/or amelioration of rheumatoid arthritis.

[1040] In another embodiment, the polynucleotides encoding a polypeptide of the present invention are administered in combination with an angiogenic protein, or polynucleotides encoding an angiogenic protein. Examples of angiogenic proteins that may be administered with the compositions of the invention include, but are not limited to, acidic and basic fibroblast growth factors, VEGF-1, VEGF-2, VEGF-3, epidermal growth factor alpha and beta, platelet-derived endothelial cell growth factor, platelet-derived growth factor, tumor necrosis factor alpha, hepatocyte growth factor, insulin-like growth factor, colony stimulating factor, macrophage colony stimulating factor, granulocyte/macrophage colony stimulating factor, and nitric oxide synthase.

[1041] In additional embodiments, compostions of the invention are administered in combination with a chemotherapeutic agent. Chemotherapeutic agents that may be administered with the Therapeutics of the invention include, but are not limited to alkylating agents such as nitrogen mustards (for example, Mechlorethamine, cyclophosphamide, Cyclophosphamide Ifosfamide, Melphalan (L-sarcolysin), and Chlorambucil), ethylenimines and methylmelamines (for example, Hexamethylmelamine and Thiotepa), alkyl sulfonates (for example, Busulfan), nitrosoureas (for example, Carmustine (BCNU), Lomustine (CCNU), Semustine (methyl-CCNU), and Streptozocin (streptozotocin)), triazenes (for example, Dacarbazine (DTIC; dimethyltriazenoimidazolecarboxamide)), folic acid analogs (for example, Methotrexate (amethopterin)), pyrimidine analogs (for example, Fluorouacil (5-fluorouracil; 5-FU), Floxuridine (fluorodeoxyuridine; FudR), and Cytarabine (cytosine arabinoside)), purine analogs and related inhibitors (for example, Mercaptopurine (6-mercaptopurine; 6-MP), Thioguanine (6-thioguanine; TG), and Pentostatin (2′-deoxycoformycin)), vinca alkaloids (for example, Vinblastine (VLB, vinblastine sulfate) and Vincristine (vincristine sulfate)), epipodophyllotoxins (for example, Etoposide and Teniposide), antibiotics (for example, Dactinomycin (actinomycin D), Daunorubicin (daunomycin; rubidomycin), Doxorubicin, Bleomycin, Plicamycin (mithramycin), and Mitomycin (mitomycin C), enzymes (for example, L-Asparaginase), biological response modifiers (for example, Interferon-alpha and interferon-alpha-2b), platinum coordination compounds (for example, Cisplatin (cis-DDP) and Carboplatin), anthracenedione (Mitoxantrone), substituted ureas (for example, Hydroxyurea), methylhydrazine derivatives (for example, Procarbazine (N-methythydrazine; MIH), adrenocorticosteroids (for example, Prednisone), progestins (for example, Hydroxyprogesterone caproate, Medroxyprogesterone, Medroxyprogesterone acetate, and Megestrol acetate), estrogens (for example, Diethylstilbestrol (DES), Diethylstilbestrol diphosphate, Estradiol, and Ethinyl estradiol), antiestrogens (for example, Tamoxifen), androgens (Testosterone proprionate, and Fluoxymesterone), antiandrogens (for example, Flutamide), gonadotropin-releasing horomone analogs (for example, Leuprolide), other hormones and hormone analogs (for example, methyltestosterone, estramustine, estramustine phosphate sodium, chlorotrianisene, and testolactone), and others (for example, dicarbazine, glutamic acid, and mitotane).

[1042] In one embodiment, the compositions of the invention are administered in combination with one or more of the following drugs: infliximab (also known as Remicade™ Centocor, Inc.), Trocade (Roche, RO-32-3555), Leflunomide (also known as Arava™ from Hoechst Marion Roussel), Kineret™ (an IL-1 Receptor antagonist also known as Anakinra from Amgen, Inc.).

[1043] In a specific embodiment, compositions of the invention are administered in combination with CHOP (cyclophosphamide, doxorubicin, vincristine, and prednisone) or combination of one or more of the components of CHOP. In one embodiment, the compositions of the invention are administered in combination with anti-CD20 antibodies, human monoclonal anti-CD20 antibodies. In another embodiment, the compositions of the invention are administered in combination with anti-CD20 antibodies and CHOP, or anti-CD20 antibodies and any combination of one or more of the components of CHOP, particularly cyclophosphamide and/or prednisone. In a specific embodiment, compositions of the invention are administered in combination with Rituximab. In a further embodiment, compositions of the invention are administered with Rituximab and CHOP, or Rituximab and any combination of one or more of the components of CHOP, particularly cyclophosphamide and/or prednisone. In a specific embodiment, compositions of the invention are administered in combination with tositumomab. In a further embodiment, compositions of the invention are administered with tositumomab and CHOP, or tositumomab and any combination of one or more of the components of CHOP, particularly cyclophosphamide and/or prednisone. The anti-CD20 antibodies may optionally be associated with radioisotopes, toxins or cytotoxic prodrugs.

[1044] In another specific embodiment, the compositions of the invention are administered in combination Zevalin™. In a further embodiment, compositions of the invention are administered with Zevalin™ and CHOP, or Zevalin™ and any combination of one or more of the components of CHOP, particularly cyclophosphamide and/or prednisone. Zevalin™ may be associated with one or more radisotopes. Particularly preferred isotopes are ⁹⁰Y and ¹¹¹In.

[1045] In an additional embodiment, the Therapeutics of the invention are administered in combination with cytokines. Cytokines that may be administered with the Therapeutics of the invention include, but are not limited to, IL2, IL3, IL4, IL5, IL6, IL7, IL10, IL12, IL13, IL15, anti-CD40, CD40L, IFN-gamma and TNF-alpha. In another embodiment, Therapeutics of the invention may be administered with any interleukin, including, but not limited to, IL-1alpha, IL-1beta, IL-2, IL-3, IL-4, IL-5, IL-6, IL-7, IL-8, IL-9, IL-10, IL-Il, IL-12, IL-13, IL-14, IL-15, IL-16, IL-17, IL-18, IL-19, IL-20, and IL-21.

[1046] In one embodiment, the Therapeutics of the invention are administered in combination with members of the TNF family. TNF, TNF-related or TNF-like molecules that may be administered with the Therapeutics of the invention include, but are not limited to, soluble forms of TNF-alpha, lymphotoxin-alpha (LT-alpha, also known as TNF-beta), LT-beta (found in complex heterotrimer LT-alpha2-beta), OPGL, FasL, CD27L, CD30L, CD40L, 4-1BBL, DcR3, OX40L, TNF-gamma (International Publication No. WO 96/14328), AIM-I (International Publication No. WO 97/33899), endokine-alpha (International Publication No. WO 98/07880), OPG, and neutrokine-alpha (International Publication No. WO 98/18921, OX40, and nerve growth factor (NGF), and soluble forms of Fas, CD30, CD27, CD40 and 4-IBB, TR2 (International Publication No. WO 96/34095), DR3 (International Publication No. WO 97/33904), DR4 (International Publication No. WO 98/32856), TR5 (International Publication No. WO 98/30693), TRANK, TR9 (International Publication No. WO 98/56892),TR10 (International Publication No. WO 98/54202), 312C2 (International Publication No. WO 98/06842), and TR12, and soluble forms CD154, CD70, and CD153.

[1047] In an additional embodiment, the Therapeutics of the invention are administered in combination with angiogenic proteins. Angiogenic proteins that may be administered with the Therapeutics of the invention include, but are not limited to, Glioma Derived Growth Factor (GDGF), as disclosed in European Patent Number EP-399816; Platelet Derived Growth Factor-A (PDGF-A), as disclosed in European Patent Number EP-682110; Platelet Derived Growth Factor-B (PDGF-B), as disclosed in European Patent Number EP-282317; Placental Growth Factor (PlGF), as disclosed in International Publication Number WO 92/06194; Placental Growth Factor-2 (PlGF-2), as disclosed in Hauser et.al., Growth Factors, 4:259-268 (1993); Vascular Endothelial Growth Factor (VEGF), as disclosed in International Publication Number WO 90/13649; Vascular Endothelial Growth Factor-A (VEGF-A), as disclosed in European Patent Number EP-506477; Vascular Endothelial Growth Factor-2 (VEGF-2), as disclosed in International Publication Number WO 96/39515; Vascular Endothelial Growth Factor B (VEGF-3); Vascular Endothelial Growth Factor B-186 (VEGF-B186), as disclosed in International Publication Number WO 96/26736; Vascular Endothelial Growth Factor-D (VEGF-D), as disclosed in International Publication Number WO 98/02543; Vascular Endothelial Growth Factor-D (VEGF-D), as disclosed in International Publication Number WO 98/07832; and Vascular Endothelial Growth Factor-E (VEGF-E), as disclosed in German Patent Number DE19639601. The above mentioned references are herein incorporated by reference in their entireties.

[1048] In an additional embodiment, the Therapeutics of the invention are administered in combination with Fibroblast Growth Factors. Fibroblast Growth Factors that may be administered with the Therapeutics of the invention include, but are not limited to, FGF-1, FGF-2, FGF-3, FGF-4, FGF-5, FGF-6, FGF-7, FGF-8, FGF-9, FGF-10, FGF-11, FGF-12, FGF-13, FGF-14, and FGF-15.

[1049] In an additional embodiment, the Therapeutics of the invention are administered in combination with hematopoietic growth factors. Hematopoietic growth factors that may be administered with the Therapeutics of the invention include, but are not limited to, granulocyte macrophage colony stimulating factor (GM-CSF) (sargramostim, LEUKINE™, PROKINE™), granulocyte colony stimulating factor (G-CSF) (filgrastim, NEUPOGEN™), macrophage colony stimulating factor (M-CSF, CSF-1) erythropoietin (epoetin alfa, EPOGEN™, PROCRIT™), stem cell factor (SCF, c-kit ligand, steel factor), megakaryocyte colony stimulating factor, PIXY321 (a GMCSF/IL-3 fusion protein), interleukins, especially any one or more of IL-1 through IL-12, interferon-gamma, or thrombopoietin.

[1050] In certain embodiments, Therapeutics of the present invention are administered in combination with adrenergic blockers, such as, for example, acebutolol, atenolol, betaxolol, bisoprolol, carteolol, labetalol, metoprolol, nadolol, oxprenolol, penbutolol, pindolol, propranolol, sotalol, and timolol.

[1051] In another embodiment, the Therapeutics of the invention are administered in combination with an antiarrhythmic drug (e.g., adenosine, amidoarone, bretylium, digitalis, digoxin, digitoxin, diliazem, disopyramide, esmolol, flecainide, lidocaine, mexiletine, moricizine, phenytoin, procainamide, N-acetyl procainamide, propafenone, propranolol, quinidine, sotalol, tocainide, and verapamil).

[1052] In another embodiment, the Therapeutics of the invention are administered in combination with diuretic agents, such as carbonic anhydrase-inhibiting agents (e.g., acetazolamide, dichlorphenamide, and methazolamide), osmotic diuretics (e.g., glycerin, isosorbide, mannitol, and urea), diuretics that inhibit Na⁺-K⁺-2Cl⁻ symport (e.g., furosemide, bumetamide, azosemide, piretamide, tripamide, ethacrynic acid, muzolimine, and torsemide), thiazide and thiazide-like diuretics (e.g., bendroflumethiazide, benzthiazide, chlorothiazide, hydrochlorothiazide, hydroflumethiazide, methyclothiazide, polythiazide, trichormethiazide, chlorthalidone, indapamide, metolazone, and quinethazone), potassium sparing diuretics (e.g., amiloride and triamterene), and mineralcorticoid receptor antagonists (e.g., spironolactone, canrenone, and potassium canrenoate).

[1053] In one embodiment, the Therapeutics of the invention are administered in combination with treatments for endocrine and/or hormone imbalance disorders. Treatments for endocrine and/or hormone imbalance disorders include, but are not limited to, ¹²⁷I, radioactive isotopes of iodine such as ¹³¹I and ¹²³I; recombinant growth hormone, such as HUMATROPE™ (recombinant somatropin); growth hormone analogs such as PROTROPIN™ (somatrem); dopamine agonists such as PARLODEL™ (bromocriptine); somatostatin analogs such as SANDOSTATIN™ (octreotide); gonadotropin preparations such as PREGNYL™, A.P.L.™ and PROFASI™ (chorionic gonadotropin (CG)), PERGONAL™ (menotropins), and METRODIN™ (urofollitropin (uFSH)); synthetic human gonadotropin releasing hormone preparations such as FACTREL™ and LUTREPULSE™ (gonadorelin hydrochloride); synthetic gonadotropin agonists such as LUPRON™ (leuprolide acetate), SUPPRELIN™ (histrelin acetate), SYNAREL™ (nafarelin acetate), and ZOLADEX™ (goserelin acetate); synthetic preparations of thyrotropin-releasing hormone such as RELEFACT TRH™ and THYPINONE™ (protirelin); recombinant human TSH such as THYROGEN™; synthetic preparations of the sodium salts of the natural isomers of thyroid hormones such as L-T₄™, SYNTHROID™ and LEVOTHROID™ (levothyroxine sodium), L-T₃™, CYTOMEL™ and TRIOSTAT™ (liothyroine sodium), and THYROLAR™ (liotrix); antithyroid compounds such as 6-n-propylthiouracil (propylthiouracil), 1-methyl-2-mercaptoimidazole and TAPAZOLE™ (methimazole), NEO-MERCAZOLE™ (carbimazole); beta-adrenergic receptor antagonists such as propranolol and esmolol; Ca²⁺ channel blockers; dexamethasone and iodinated radiological contrast agents such as TELEPAQUE™ (iopanoic acid) and ORAGRAFIN™ (sodium ipodate); estrogens or congugated estrogens such as ESTRACE™ (estradiol), ESTINYL™ (ethinyl estradiol), PREMARIN™, ESTRATAB™, ORTHO-EST™, OGEN™ and estropipate (estrone), ESTROVIS™ (quinestrol), ESTRADER™ (estradiol), DELESTROGEN™ and VALERGEN™ (estradiol valerate), DEPO-ESTRADIOL CYPIONATE™ and ESTROJECT LA™ (estradiol cypionate); antiestrogens such as NOLVADEX™ (tamoxifen), SEROPHENE™ and CLOMID™ (clomiphene); progestins such as DURALUTIN™ (hydroxyprogesterone caproate), MPA™ and DEPO-PROVERA™ (medroxyprogesterone acetate), PROVERA™ and CYCRIN™ (MPA), MEGACE™ (megestrol acetate), NORLUTIN™ (norethindrone), and NORLUTATE™ and AYGESTIN™ (norethindrone acetate); progesterone implants such as NORPLANT SYSTEM™ (subdermal implants of norgestrel); antiprogestins such as RU 486™ (mifepristone); hormonal contraceptives such as ENOVID™ (norethynodrel plus mestranol), PROGESTASERT™ (intrauterine device that releases progesterone), LOESTRIN™, BREVICON™, MODICONT™, GENORA™, NELONA™, NORINYL™, OVACON-35™ and OVACON-50™ (ethinyl estradiol/norethindrone), LEVLEN™, NORDETTE™, TRI-LEVLEN™ and TRIPHASIL-21™ (ethinyl estradiol/levonorgestrel) LO/OVRAL™ and OVRAL™ (ethinyl estradiol/norgestrel), DEMULEN™ (ethinyl estradiol/ethynodiol diacetate), NORINYL™, ORTHO—NOVLM™, NORETHIN™, GENORA™, and NELOVA™ (norethindrone/mestranol), DESOGEN™ and ORTHO-CEPT™ (ethinyl estradiol/desogestrel), ORTHO-CYCLEN™ and ORTHO-TRICYCLEN™ (ethinyl estradiol/norgestimate), MICRONOR™ and NOR-QD™ (norethindrone), and OVRETTE™ (norgestrel); testosterone esters such as methenolone acetate and testosterone undecanoate; parenteral and oral androgens such as TESTOJECT-50™ (testosterone), TESTEX™ (testosterone propionate), DELATESTRYL™ (testosterone enanthate), DEPO-TESTOSTERONE™ (testosterone cypionate), DANOCRINE™ (danazol), HALOTESTIN™ (fluoxymesterone), ORETON METHYL™, TESTRED™ and VIRILON™ (methyltestosterone), and OXANDRIN™ (oxandrolone); testosterone transdermal systems such as TESTODERM™; androgen receptor antagonist and 5-alpha-reductase inhibitors such as ANDROCUR™ (cyproterone acetate), EULEXIN™ (flutamide), and PROSCAR™ (finasteride); adrenocorticotropic hormone preparations such as CORTROSYN™ (cosyntropin); adrenocortical steroids and their synthetic analogs such as ACLOVATE™ (alclometasone dipropionate), CYCLOCORT™ (amcinonide), BECLOVENT™ and VANCERIL™ (beclomethasone dipropionate), CELESTONE™ (betamethasone), BENISONE™ and UTICORT™ (betamethasone benzoate), DIPROSONE™ (betamethasone dipropionate), CELESTONE PHOSPHATE™ (betamethasone sodium phosphate), CELESTONE SOLUSPAN™ (betamethasone sodium phosphate and acetate), BETA-VAL™ and VALISONE™ (betamethasone valerate), TEMOVATE™ (clobetasol propionate), CLODER™ (clocortolone pivalate), CORTEF™ and HYDROCORTONE™ (cortisol (hydrocortisone)), HYDROCORTONE ACETATE™ (cortisol (hydrocortisone) acetate), LOCOID™ (cortisol (hydrocortisone) butyrate), HYDROCORTONE PHOSPHATE™ (cortisol (hydrocortisone) sodium phosphate), A-HYDROCORT™ and SOLU CORTEF™ (cortisol (hydrocortisone) sodium succinate), WESTCOR™ (cortisol (hydrocortisone) valerate), CORTISONE ACETATE™ (cortisone acetate), DESOWEN™ and TRIDESILON™ (desonide), TOPICOR™ (desoximetasone), DECADRON™ (dexamethasone), DECADRON LA™ (dexamethasone acetate), DECADRON PHOSPHATE™ and HEXADROL PHOSPHATE™ (dexamethasone sodium phosphate), FLORONE™ and MAXIFLOR™ (diflorasone diacetate), FLORINEF ACETATE™ (fludrocortisone acetate), AEROBID™ and NASALIDE™ (flunisolide), FLUONID™ and SYNALAR™ (fluocinolone acetonide), LIDEX™ (fluocinonide), FLUOR-OP™ and FML™ (fluorometholone), CORDRAN™ (flurandrenolide), HALOG™ (halcinonide), HMS LIZUIFILM™ (medrysone), MEDROL™ (methylprednisolone), DEPO-MEDROL™ and MEDROL ACETATE™ (methylprednisone acetate), A-METHAPRED™ and SOLUMEDROL™ (methylprednisolone sodium succinate), ELOCON™ (mometasone furoate), HALDRONE™ (paramethasone acetate), DELTA-CORTEF™ (prednisolone), ECONOPRED™ (prednisolone acetate), HYDELTRASOL™ (prednisolone sodium phosphate), HYDELTRA-T.B.A™ (prednisolone tebutate), DELTASONE™ (prednisone), ARISTOCORT™ and KENACORT™ (triamcinolone), KENALOG™ (triamcinolone acetonide), ARISTOCORT™ and KENACORT DIACETATE™ (triamcinolone diacetate), and ARISTOSPAN™ (triamcinolone hexacetonide); inhibitors of biosynthesis and action of adrenocortical steroids such as CYTADREN™ (aminoglutethimide), NIZORAL™ (ketoconazole), MODRASTANE™ (trilostane), and METOPIRONE™ (metyrapone); bovine, porcine or human insulin or mixtures thereof; insulin analogs; recombinant human insulin such as HUMULIN™ and NOVOLIN™; oral hypoglycemic agents such as ORAMIDE™ and ORINASE™ (tolbutamide), DIABINESE™ (chlorpropamide), TOLAMIDE™ and TOLINASE™ (tolazamide), DYMELOR™ (acetohexamide), glibenclamide, MICRONASE™, DIBETA™ and GLYNASE™ (glyburide), GLUCOTROL™ (glipizide), and DIAMICRON™ (gliclazide), GLUCOPHAGE™ (metformin), ciglitazone, pioglitazone, and alpha-glucosidase inhibitors; bovine or porcine glucagon; somatostatins such as SANDOSTATIN™ (octreotide); and diazoxides such as PROGLYCEM™ (diazoxide).

[1054] In one embodiment, the Therapeutics of the invention are administered in combination with treatments for uterine motility disorders. Treatments for uterine motility disorders include, but are not limited to, estrogen drugs such as conjugated estrogens (e.g., PREMARIN® and ESTRATAB®), estradiols (e.g., CLIMARA® and ALORA®), estropipate, and chlorotrianisene; progestin drugs (e.g., AMEN® (medroxyprogesterone), MICRONOR® (norethidrone acetate), PROMETRIUM® progesterone, and megestrol acetate); and estrogenl/progesterone combination therapies such as, for example, conjugated estrogens/medroxyprogesterone (e.g., PREMPRO™ and PREMPHASE®) and norethindrone acetate/ethinyl estsradiol (e.g., FEMHRT™).

[1055] In an additional embodiment, the Therapeutics of the invention are administered in combination with drugs effective in treating iron deficiency and hypochromic anemias, including but not limited to, ferrous sulfate (iron sulfate, FEOSOL™), ferrous fumarate (e.g., FEOSTAT™), ferrous gluconate (e.g., FERGON™), polysaccharide-iron complex (e.g., NIFEREX™), iron dextran injection (e.g., INFED™), cupric sulfate, pyroxidine, riboflavin, Vitamin B₁₂, cyancobalamin injection (e.g., REDISOL™, RUBRAMIN PC™), hydroxocobalamin, folic acid (e.g., FOLVITE™), leucovorin (folinic acid, 5-CHOH4PteGlu, citrovorum factor) or WELLCOVORIN (Calcium salt of leucovorin), transferrin or ferritin.

[1056] In certain embodiments, the Therapeutics of the invention are administered in combination with agents used to treat psychiatric disorders. Psychiatric drugs that may be administered with the Therapeutics of the invention include, but are not limited to, antipsychotic agents (e.g., chlorpromazine, chlorprothixene, clozapine, fluphenazine, haloperidol, loxapine, mesoridazine, molindone, olanzapine, perphenazine, pimozide, quetiapine, risperidone, thioridazine, thiothixene, trifluoperazine, and triflupromazine), antimanic agents (e.g., carbamazepine, divalproex sodium, lithium carbonate, and lithium citrate), antidepressants (e.g., amitriptyline, amoxapine, bupropion, citalopram, clomipramine, desipramine, doxepin, fluvoxamine, fluoxetine, imipramine, isocarboxazid, maprotiline, mirtazapine, nefazodone, nortriptyline, paroxetine, phenelzine, protriptyline, sertraline, tranylcypromine, trazodone, trimipramine, and venlafaxine), antianxiety agents (e.g., alprazolam, buspirone, chlordiazepoxide, clorazepate, diazepam, halazepam, lorazepam, oxazepam, and prazepam), and stimulants (e.g., d-amphetamine, methylphenidate, and pemoline).

[1057] In other embodiments, the Therapeutics of the invention are administered in combination with agents used to treat neurological disorders. Neurological agents that may be administered with the Therapeutics of the invention include, but are not limited to, antiepileptic agents (e.g., carbamazepine, clonazepam, ethosuximide, phenobarbital, phenytoin, primidone, valproic acid, divalproex sodium, felbamate, gabapentin, lamotrigine, levetiracetam, oxcarbazepine, tiagabine, topiramate, zonisamide, diazepam, lorazepam, and clonazepam), antiparkinsonian agents (e.g., levodopa/carbidopa, selegiline, amantidine, bromocriptine, pergolide, ropinirole, pramipexole, benztropine; biperiden; ethopropazine; procyclidine; trihexyphenidyl, tolcapone), and ALS therapeutics (e.g. riluzole).

[1058] In another embodiment, Therapeutics of the invention are administered in combination with vasodilating agents and/or calcium channel blocking agents. Vasodilating agents that may be administered with the Therapeutics of the invention include, but are not limited to, Angiotensin Converting Enzyme (ACE) inhibitors (e.g., papaverine, isoxsuprine, benazepril, captopril, cilazapril, enalapril, enalaprilat, fosinopril, lisinopril, moexipril, perindopril, quinapril, ramipril, spirapril, trandolapril, and nylidrin), and nitrates (e.g., isosorbide dinitrate, isosorbide mononitrate, and nitroglycerin). Examples of calcium channel blocking agents that may be administered in combination with the Therapeutics of the invention include, but are not limited to amlodipine, bepridil, diltiazem, felodipine, flunarizine, isradipine, nicardipine, nifedipine, nimodipine, and verapamil.

[1059] In additional embodiments, the Therapeutics of the invention are administered in combination with other therapeutic or prophylactic regimens, such as, for example, radiation therapy.

### Example 14

### Method of Treating Decreased Levels of the Polypeptide

[1060] The present invention relates to a method for treating an individual in need of an increased level of a polypeptide of the invention in the body comprising administering to such an individual a composition comprising a therapeutically effective amount of an agonist of the invention (including polypeptides of the invention). Moreover, it will be appreciated that conditions caused by a decrease in the standard or normal expression level of a polypeptide of the present invention in an individual can be treated by administering the agonist or antagonist of the present invention. Thus, the invention also provides a method of treatment of an individual in need of an increased level of the polypeptide comprising administering to such an individual a Therapeutic comprising an amount of the agonist or antagonist to increase the activity level of the polypeptide in such an individual.

[1061] For example, a patient with decreased levels of a polypeptide receives a daily dose 0.1-100 ug/kg of the agonist or antagonist for six consecutive days. The exact details of the dosing scheme, based on administration and formulation, are provided in Example 13.

### Example 15

### Method of Treating Increased Levels of the Polypeptide

[1062] The present invention also relates to a method of treating an individual in need of a decreased level of a polypeptide of the invention in the body comprising administering to such an individual a composition comprising a therapeutically effective amount of an antagonist of the invention (including polypeptides and antibodies of the invention).

[1063] In one example, antisense technology is used to inhibit production of a polypeptide of the present invention. This technology is one example of a method of decreasing levels of a polypeptide, due to a variety of etiologies, such as cancer.

[1064] For example, a patient diagnosed with abnormally increased levels of a polypeptide is administered intravenously antisense polynucleotides at 0.5, 1.0, 1.5, 2.0 and 3.0 mg/kg day for 21 days. This treatment is repeated after a 7-day rest period if the treatment was well tolerated. The formulation of the antisense polynucleotide is provided in Example 13.

### Example 16

### Method of Treatment Using Gene Therapy—Ex Vivo

[1065] One method of gene therapy transplants fibroblasts, which are capable of expressing a polypeptide, onto a patient. Generally, fibroblasts are obtained from a subject by skin biopsy. The resulting tissue is placed in tissue-culture medium and separated into small pieces. Small chunks of the tissue are placed on a wet surface of a tissue culture flask, approximately ten pieces are placed in each flask. The flask is turned upside down, closed tight and left at room temperature over night. After 24 hours at room temperature, the flask is inverted and the chunks of tissue remain fixed to the bottom of the flask and fresh media (e.g., Ham's F12 media, with 10% FBS, penicillin and streptomycin) is added. The flasks are then incubated at 37 degree C. for approximately one week.

[1066] At this time, fresh media is added and subsequently changed every several days. After an additional two weeks in culture, a monolayer of fibroblasts emerge. The monolayer is trypsinized and scaled into larger flasks.

[1067] pMV-7 (Kirschmeier, P. T. et al., DNA, 7:219-25 (1988)), flanked by the long terminal repeats of the Moloney murine sarcoma virus, is digested with EcoRI and HindIII and subsequently treated with calf intestinal phosphatase. The linear vector is fractionated on agarose gel and purified, using glass beads.

[1068] The cDNA encoding a polypeptide of the present invention can be amplified using PCR primers which correspond to the 5′ and 3′ end sequences respectively as set forth in Example 1 using primers and having appropriate restriction sites and initiation/stop codons, if necessary. Preferably, the 5′ primer contains an EcoRI site and the 3′ primer includes a HindIII site. Equal quantities of the Moloney murine sarcoma virus linear backbone and the amplified EcoRI and HindIII fragment are added together, in the presence of T4 DNA ligase. The resulting mixture is maintained under conditions appropriate for ligation of the two fragments. The ligation mixture is then used to transform bacteria HB 101, which are then plated onto agar containing kanamycin for the purpose of confirming that the vector has the gene of interest properly inserted.

[1069] The amphotropic pA317 or GP+am12 packaging cells are grown in tissue culture to confluent density in Dulbecco's Modified Eagles Medium (DMEM) with 10% calf serum (CS), penicillin and streptomycin. The MSV vector containing the gene is then added to the media and the packaging cells transduced with the vector. The packaging cells now produce infectious viral particles containing the gene (the packaging cells are now referred to as producer cells).

[1070] Fresh media is added to the transduced producer cells, and subsequently, the media is harvested from a 10 cm plate of confluent producer cells. The spent media, containing the infectious viral particles, is filtered through a millipore filter to remove detached producer cells and this media is then used to infect fibroblast cells. Media is removed from a sub-confluent plate of fibroblasts and quickly replaced with the media from the producer cells. This media is removed and replaced with fresh media. If the titer of virus is high, then virtually all fibroblasts will be infected and no selection is required. If the titer is very low, then it is necessary to use a retroviral vector that has a selectable marker, such as neo or his. Once the fibroblasts have been efficiently infected, the fibroblasts are analyzed to determine whether protein is produced.

[1071] The engineered fibroblasts are then transplanted onto the host, either alone or after having been grown to confluence on cytodex 3 microcarrier beads.

### Example 17

### Gene Therapy Using Endogenous Genes Corresponding to Polynucleotides of the Invention

[1072] Another method of gene therapy according to the present invention involves operably associating the endogenous polynucleotide sequence of the invention with a promoter via homologous recombination as described, for example, in U.S. Pat. No. 5,641,670, issued Jun. 24, 1997; International Publication NO: WO 96/29411, published Sep. 26, 1996; International Publication NO: WO 94/12650, published Aug. 4, 1994; K.oller et al., Proc. Natl. Acad. Sci. USA, 86:8932-8935 (1989); and Zijlstra et al., Nature, 342:435-438 (1989). This method involves the activation of a gene which is present in the target cells, but which is not expressed in the cells, or is expressed at a lower level than desired.

[1073] Polynucleotide constructs are made which contain a promoter and targeting sequences, which are homologous to the 5′ non-coding sequence of endogenous polynucleotide sequence, flanking the promoter. The targeting sequence will be sufficiently near the 5′ end of the polynucleotide sequence so the promoter will be operably linked to the endogenous sequence upon homologous recombination. The promoter and the targeting sequences can be amplified using PCR. Preferably, the amplified promoter contains distinct restriction enzyme sites on the 5′ and 3′ ends. Preferably, the 3′ end of the first targeting sequence contains the same restriction enzyme site as the 5′ end of the amplified promoter and the 5′ end of the second targeting sequence contains the same restriction site as the 3′ end of the amplified promoter.

[1074] The amplified promoter and the amplified targeting sequences are digested with the appropriate restriction enzymes and subsequently treated with calf intestinal phosphatase. The digested promoter and digested targeting sequences are added together in the presence of T4 DNA ligase. The resulting mixture is maintained under conditions appropriate for ligation of the two fragments. The construct is size fractionated on an agarose gel, then purified by phenol extraction and ethanol precipitation.

[1075] In this Example, the polynucleotide constructs are administered as naked polynucleotides via electroporation. However, the polynucleotide constructs may also be administered with transfection-facilitating agents, such as liposomes, viral sequences, viral particles, precipitating agents, etc. Such methods of delivery are known in the art.

[1076] Once the cells are transfected, homologous recombination will take place which results in the promoter being operably linked to the endogenous polynucleotide sequence. This results in the expression of polynucleotide corresponding to the polynucleotide in the cell. Expression may be detected by immunological staining, or any other method known in the art.

[1077] Fibroblasts are obtained from a subject by skin biopsy. The resulting tissue is placed in DMEM+10% fetal calf serum. Exponentially growing or early stationary phase fibroblasts are trypsinized and rinsed from the plastic surface with nutrient medium. An aliquot of the cell suspension is removed for counting, and the remaining cells are subjected to centrifugation. The supernatant is aspirated and the pellet is resuspended in 5 ml of electroporation buffer (20 mM HEPES pH 7.3, 137 MM NaCl, 5 mM KCl, 0.7 mM Na₂ HPO₄, 6 mM dextrose). The cells are recentrifuged, the supernatant aspirated, and the cells resuspended in electroporation buffer containing 1 mg/ml acetylated bovine serum albumin. The final cell suspension contains approximately 3×10⁶ cells/ml. Electroporation should be performed immediately following resuspension.

[1078] Plasmid DNA is prepared according to standard techniques. For example, to construct a plasmid for targeting to the locus corresponding to the polynucleotide of the invention, plasmid pUC18 (MBI Fermentas, Amherst, N.Y.) is digested with HindIII. The CMV promoter is amplified by PCR with an XbaI site on the 5′ end and a BamHI site on the 3′ end. Two non-coding sequences are amplified via PCR: one non-coding sequence (fragment 1) is amplified with a HindIII site at the 5′ end and an Xba site at the 3′end; the other non-coding sequence (fragment 2) is amplified with a BamHI site at the 5′end and a HindIII site at the 3′end. The CMV promoter and the fragments (1 and 2) are digested with the appropriate enzymes (CMV promoter—XbaI and BamHI; fragment 1—XbaI; fragment 2—BamHI) and ligated together. The resulting ligation product is digested with HindIII, and ligated with the HindIII-digested pUC 18 plasmid.

[1079] Plasmid DNA is added to a sterile cuvette with a 0.4 cm electrode gap (Bio-Rad). The final DNA concentration is generally at least 120 μg/ml. 0.5 ml of the cell suspension (containing approximately 1.5.×10⁶ cells) is then added to the cuvette, and the cell suspension and DNA solutions are gently mixed. Electroporation is performed with a Gene-Pulser apparatus (Bio-Rad). Capacitance and voltage are set at 960 μF and 250-300 V, respectively. As voltage increases, cell survival decreases, but the percentage of surviving cells that stably incorporate the introduced DNA into their genome increases dramatically. Given these parameters, a pulse time of approximately 14-20 mSec should be observed.

[1080] Electroporated cells are maintained at room temperature for approximately 5 min, and the contents of the cuvette are then gently removed with a sterile transfer pipette. The cells are added directly to 10 ml of prewarmed nutrient media (DMEM with 15% calf serum) in a 10 cm dish and incubated at 37 degree C. The following day, the media is aspirated and replaced with 10 ml of fresh media and incubated for a further 16-24 hours.

[1081] The engineered fibroblasts are then injected into the host, either alone or after having been grown to confluence on cytodex 3 microcarrier beads. The fibroblasts now produce the protein product. The fibroblasts can then be introduced into a patient as described above.

### Example 18

### Method of Treatment Using Gene Therapy—In Vivo

[1082] Another aspect of the present invention is using in vivo gene therapy methods to treat disorders, diseases and conditions. The gene therapy method relates to the introduction of naked nucleic acid (DNA, RNA, and antisense DNA or RNA) sequences into an animal to increase or decrease the expression of the polypeptide. The polynucleotide of the present invention may be operatively linked to (i.e., associated with) a promoter or any other genetic elements necessary for the expression of the polypeptide by the target tissue. Such gene therapy and delivery techniques and methods are known in the art, see, for example, WO90/11092, WO98/11779; U.S. Pat. No. 5,693,622, 5705151, 5580859; Tabata et al., Cardiovasc. Res. 35(3):470-479 (1997); Chao et al., Pharmacol. Res. 35(6):517-522 (1997); Wolff, Neuromuscul. Disord. 7(5):314-318 (1997); Schwartz et al., Gene Ther. 3(5):405-411 (1996); Tsurumi et al., Circulation 94(12):3281-3290 (1996) (incorporated herein by reference).

[1083] The polynucleotide constructs may be delivered by any method that delivers injectable materials to the cells of an animal, such as, injection into the interstitial space of tissues (heart, muscle, skin, lung, liver, intestine and the like). The polynucleotide constructs can be delivered in a pharmaceutically acceptable liquid or aqueous carrier.

[1084] The term “naked” polynucleotide, DNA or RNA, refers to sequences that are free from any delivery vehicle that acts to assist, promote, or facilitate entry into the cell, including viral sequences, viral particles, liposome formulations, lipofectin or precipitating agents and the like. However, the polynucleotides of the present invention may also be delivered in liposome formulations (such as those taught in Felgner P. L. et al. (1995) Ann. NY Acad. Sci. 772:126-139 and Abdallah B. et al. (1995) Biol. Cell 85(1):1-7) which can be prepared by methods well known to those skilled in the art.

[1085] The polynucleotide vector constructs used in the gene therapy method are preferably constructs that will not integrate into the host genome nor will they contain sequences that allow for replication. Any strong promoter known to those skilled in the art can be used for driving the expression of DNA. Unlike other gene therapy techniques, one major advantage of introducing naked nucleic acid sequences into target cells is the transitory nature of the polynucleotide synthesis in the cells. Studies have shown that non-replicating DNA sequences can be introduced into cells to provide production of the desired polypeptide for periods of up to six months.

[1086] The polynucleotide construct can be delivered to the interstitial space of tissues within an animal, including muscle, skin, brain, lung, liver, spleen, bone marrow, thymus, heart, lymph, blood, bone, cartilage, pancreas, kidney, gall bladder, stomach, intestine, testis, ovary, uterus, rectum, nervous system, eye, gland, and connective tissue. Interstitial space of the tissues comprises the intercellular fluid, mucopolysaccharide matrix among the reticular fibers of organ tissues, elastic fibers in the walls of vessels or chambers, collagen fibers of fibrous tissues, or that same matrix within connective tissue ensheathing muscle cells or in the lacunae of bone. It is similarly the space occupied by the plasma of the circulation and the lymph fluid of the lymphatic channels. Delivery to the interstitial space of muscle tissue is preferred for the reasons discussed below. They may be conveniently delivered by injection into the tissues comprising these cells. They are preferably delivered to and expressed in persistent, non-dividing cells which are differentiated, although delivery and expression may be achieved in non-differentiated or less completely differentiated cells, such as, for example, stem cells of blood or skin fibroblasts. In vivo muscle cells are particularly competent in their ability to take up and express polynucleotides.

[1087] For the naked polynucleotide injection, an effective dosage amount of DNA or RNA will be in the range of from about 0.05 g/kg body weight to about 50 mg/kg body weight. Preferably the dosage will be from about 0.005 mg/kg to about 20 mg/kg and more preferably from about 0.05 mg/kg to about 5 mg/kg. Of course, as the artisan of ordinary skill will appreciate, this dosage will vary according to the tissue site of injection. The appropriate arid effective dosage of nucleic acid sequence can readily be determined by those of ordinary skill in the art and may depend on the condition being treated and the route of administration. The preferred route of administration is by the parenteral route of injection into the interstitial space of tissues. However, other parenteral routes may also be used, such as, inhalation of an aerosol formulation particularly for delivery to lungs or bronchial tissues, throat or mucous membranes of the nose. In addition, naked polynucleotide constructs can be delivered to arteries during angioplasty by the catheter used in the procedure.

[1088] The dose response effects of injected polynucleotide in muscle in vivo is determined as follows. Suitable template DNA for production of mRNA coding for polypeptide of the present invention is prepared in accordance with a standard recombinant DNA methodology. The template DNA, which may be either circular or linear, is either used as naked DNA or complexed with liposomes. The quadriceps muscles of mice are then injected with various amounts of the template DNA.

[1089] Five to six week old female and male Balb/C mice are anesthetized by intraperitoneal injection with 0.3 ml of 2.5% Avertin. A 1.5 cm incision is made on the anterior thigh, and the quadriceps muscle is directly visualized. The template DNA is injected in 0.1 ml of carrier in a 1 cc syringe through a 27 gauge needle over one minute, approximately 0.5 cm from the distal insertion site of the muscle into the knee and about 0.2 cm deep. A suture is placed over the injection site for future localization, and the skin is closed with stainless steel clips.

[1090] After an appropriate incubation time (e.g., 7 days) muscle extracts are prepared by excising the entire quadriceps. Every fifth 15 um cross-section of the individual quadriceps muscles is histochemically stained for protein expression. A time course for protein expression may be done in a similar fashion except that quadriceps from different mice are harvested at different times. Persistence of DNA in muscle following injection may be determined by Southern blot analysis after preparing total cellular DNA and HIRT supernatants from injected and control mice. The results of the above experimentation in mice can be used to extrapolate proper dosages and other treatment parameters in humans and other animals using naked DNA.

### Example 19

### Transgenic Animals

[1091] The polypeptides of the invention can also be expressed in transgenic animals. Animals of any species, including, but not limited to, mice, rats, rabbits, hamsters, guinea pigs, pigs, micro-pigs, goats, sheep, cows and non-human primates, e.g., baboons, monkeys, and chimpanzees may be used to generate transgenic animals. In a specific embodiment, techniques described herein or otherwise known in the art, are used to express polypeptides of the invention in humans, as part of a gene therapy protocol.

[1092] Any technique known in the art may be used to introduce the transgene (i.e., polynucleotides of the invention) into animals to produce the founder lines of transgenic animals. Such techniques include, but are not limited to, pronuclear microinjection (Paterson et al., Appl. Microbiol. Biotechnol. 40:691-698 (1994); Carver et al., Biotechnology (NY) 11:1263-1270 (1993); Wright et al., Biotechnology (NY) 9:830-834 (1991); and Hoppe et al., U.S. Pat. No. 4,873,191 (1989)); retrovirus mediated gene transfer into germ lines (Van der Putten et al., Proc. Natl. Acad. Sci., USA 82:6148-6152 (1985)), blastocysts or embryos; gene targeting in embryonic stem cells (Thompson et al., Cell 56:313-321 (1989)); electroporation of cells or embryos (Lo, 1983, Mol Cell. Biol. 3:1803-1814 (1983)); introduction of the polynucleotides of the invention using a gene gun (see, e.g., Ulmer et al., Science 259:1745 (1993); introducing nucleic acid constructs into embryonic pleuripotent stem cells and transferring the stem cells back into the blastocyst; and sperm-mediated gene transfer (Lavitrano et al., Cell 57:717-723 (1989); etc. For a review of such techniques, see Gordon, “Transgenic Animals,” Intl. Rev. Cytol. 115:171-229 (1989), which is incorporated by reference herein in its entirety.

[1093] Any technique known in the art may be used to produce transgenic clones containing polynucleotides of the invention, for example, nuclear transfer into enucleated oocytes of nuclei from cultured embryonic, fetal, or adult cells induced to quiescence (Campell et al., Nature 380:64-66 (1996); Wilmut et al., Nature 385:810-813 (1997)).

[1094] The present invention provides for transgenic animals that carry the transgene in all their cells, as well as animals which carry the transgene in some, but not all their cells, i.e., mosaic animals or chimeric. The transgene may be integrated as a single transgene or as multiple copies such as in concatamers, e.g., head-to-head tandems or head-to-tail tandems. The transgene may also be selectively introduced into and activated in a particular cell type by following, for example, the teaching of Lasko et al. (Lasko et al., Proc. Natl. Acad. Sci. USA 89:6232-6236 (1992)). The regulatory sequences required for such a cell-type specific activation will depend upon the particular cell type of interest, and will be apparent to those of skill in the art. When it is desired that the polynucleotide transgene be integrated into the chromosomal site of the endogenous gene, gene targeting is preferred. Briefly, when such a technique is to be utilized, vectors containing some nucleotide sequences homologous to the endogenous gene are designed for the purpose of integrating, via homologous recombination with chromosomal sequences, into and disrupting the function of the nucleotide sequence of the endogenous gene. The transgene may also be selectively introduced into a particular cell type, thus inactivating the endogenous gene in only that cell type, by following, for example, the teaching of Gu et al. (Gu et al., Science 265:103-106 (1994)). The regulatory sequences required for such a cell-type specific inactivation will depend upon the particular cell type of interest, and will be apparent to those of skill in the art.

[1095] Once transgenic animals have been generated, the expression of the recombinant gene may be assayed utilizing standard techniques. Initial screening may be accomplished by Southern blot analysis or PCR techniques to analyze animal tissues to verify that integration of the transgene has taken place. The level of mRNA expression of the transgene in the tissues of the transgenic animals may also be assessed using techniques which include, but are not limited to, Northern blot analysis of tissue samples obtained from the animal, in situ hybridization analysis, and reverse transcriptase-PCR (rt-PCR). Samples of transgenic gene-expressing tissue may also be evaluated immunocytochemically or immunohistochemically using antibodies specific for the transgene product.

[1096] Once the founder animals are produced, they may be bred, inbred, outbred, or crossbred to produce colonies of the particular animal. Examples of such breeding strategies include, but are not limited to: outbreeding of founder animals with more than one integration site in order to establish separate lines; inbreeding of separate lines in order to produce compound transgenics that express the transgene at higher levels because of the effects of additive expression of each transgene; crossing of heterozygous transgenic animals to produce animals homozygous for a given integration site in order to both augment expression and eliminate the need for screening of animals by DNA analysis; crossing of separate homozygous lines to produce compound heterozygous or hornozygous lines; and breeding to place the transgene on a distinct background that is appropriate for an experimental model of interest.

[1097] Transgenic animals of the invention have uses which include, but are not limited to, animal model systems useful in elaborating the biological function of polypeptides of the present invention, studying conditions and/or disorders associated with aberrant expression, and in screening for compounds effective in ameliorating such conditions and/or disorders.

### Example 20

### Knock-Out Animals

[1098] Endogenous gene expression can also be reduced by inactivating or “knocking out” the gene and/or its promoter using targeted homologous recombination. (See e.g., Smithies et al., Nature 317:230-234 (1985); Thomas & Capecchi, Cell 51:503-512 (1987); Thompson et al., Cell 5:313-321 (1989); each of which is incorporated by reference herein in its entirety.) For example, a mutant, non-functional polynucleotide of the invention (or a completely unrelated DNA sequence) flanked by DNA homologous to the endogenous polynucleotide sequence (either the coding regions or regulatory regions of the gene) can be used, with or without a selectable marker and/or a negative selectable marker, to transfect cells that express polypeptides of the invention in vivo. In another embodiment, techniques known in the art are used to generate knockouts in cells that contain, but do not express the gene of interest. Insertion of the DNA construct, via targeted homologous recombination, results in inactivation of the targeted gene. Such approaches are particularly suited in research and agricultural fields where modifications to embryonic stem cells can be used to generate animal offspring with an inactive targeted gene (e.g., see Thomas & Capecchi 1987 and Thompson 1989, supra). However this approach can be routinely adapted for use in humans provided the recombinant DNA constructs are directly administered or targeted to the required site in vivo using appropriate viral vectors that will be apparent to those of skill in the art.

[1099] In further embodiments of the invention, cells that are genetically engineered to express the polypeptides of the invention, or alternatively, that are genetically engineered not to express the polypeptides of the invention (e.g., knockouts) are administered to a patient in vivo. Such cells may be obtained from the patient (i.e., animal, including human) or an MHC compatible donor and can include, but are not limited to fibroblasts, bone marrow cells, blood cells (e.g., lymphocytes), adipocytes, muscle cells, endothelial cells etc. The cells are genetically engineered in vitro using recombinant DNA techniques to introduce the coding sequence of polypeptides of the invention into the cells, or alternatively, to disrupt the coding sequence and/or endogenous regulatory sequence associated with the polypeptides of the invention, e.g., by transduction (using viral vectors, and preferably vectors that integrate the transgene into the cell genome) or transfection procedures, including, but not limited to, the use of plasmids, cosmids, YACs, naked DNA, electroporation, liposomes, etc. The coding sequence of the polypeptides of the invention can be placed under the control of a strong constitutive or inducible promoter or promoter/enhancer to achieve expression, and preferably secretion, of the polypeptides of the invention. The engineered cells which express and preferably secrete the polypeptides of the invention can be introduced into the patient systemically, e.g., in the circulation, or intraperitoneally.

[1100] Alternatively, the cells can be incorporated into a matrix and implanted in the body, e.g., genetically engineered fibroblasts can be implanted as part of a skin graft; genetically engineered endothelial cells can be implanted as part of a lymphatic or vascular graft. (See, for example, Anderson et al. U.S. Pat. No. 5,399,349; and Mulligan & Wilson, U.S. Pat. No. 5,460,959 each of which is incorporated by reference herein in its entirety).

[1101] When the cells to be administered are non-autologous or non-MHC compatible cells, they can be administered using well known techniques which prevent the development of a host immune response against the introduced cells. For example, the cells may be introduced in an encapsulated form which, while allowing for an exchange of components with the immediate extracellular environment, does not allow the introduced cells to be recognized by the host immune system.

[1102] Transgenic and “knock-out” animals of the invention have uses which include, but are not limited to, animal model systems useful in elaborating the biological function of polypeptides of the present invention, studying conditions and/or disorders associated with aberrant expression, and in screening for compounds effective in ameliorating such conditions and/or disorders.

### Example 21

### Assays Detecting Stimulation or Inhibition of B Cell Proliferation and Differentiation

[1103] Generation of functional humoral immune responses requires both soluble and cognate signaling between B-lineage cells and their microenvironment. Signals may impart a positive stimulus that allows a B-lineage cell to continue its programmed development, or a negative stimulus that instructs the cell to arrest its current developmental pathway. To date, numerous stimulatory and inhibitory signals have been found to influence B cell responsiveness including IL-2, IL-4, IL-5, IL-6, IL-7, IL10, IL-13, IL-14 and IL-15. Interestingly, these signals are by themselves weak effectors but can, in combination with various co-stimulatory proteins, induce activation, proliferation, differentiation, homing, tolerance and death among B cell populations.

[1104] One of the best studied classes of B-cell co-stimulatory proteins is the TNF-superfamily. Within this family CD40, CD27, and CD30 along with their respective ligands CD 154, CD70, and CD153 have been found to regulate a variety of immune responses. Assays which allow for the detection and/or observation of the proliferation and differentiation of these B-cell populations and their precursors are valuable tools in determining the effects various proteins may have on these B-cell populations in terms of proliferation and differentiation. Listed below are two assays designed to allow for the detection of the differentiation, proliferation, or inhibition of B-cell populations and their precursors.

[1105] In vitro Assay—Agonists or antagonists of the invention can be assessed for its ability to induce activation, proliferation, differentiation or inhibition and/or death in B-cell populations and their precursors. The activity of the agonists or antagonists of the invention on purified human tonsillar B cells, measured qualitatively over the dose range from 0.1 to 10,000 ng/mL, is assessed in a standard B-lymphocyte co-stimulation assay in which purified tonsillar B cells are cultured in the presence of either formalin-fixed Staphylococcus aureus Cowan I (SAC) or immobilized anti-human IgM antibody as the priming agent. Second signals such as IL-2 and IL-15 synergize with SAC and IgM crosslinking to elicit B cell proliferation as measured by tritiated-thymidine incorporation. Novel synergizing agents can be readily identified using this assay. The assay involves isolating human tonsillar B cells by magnetic bead (MACS) depletion of CD3-positive cells. The resulting cell population is greater than 95% B cells as assessed by expression of CD45R(B220).

[1106] Various dilutions of each sample are placed into individual wells of a 96-well plate to which are added 10⁵ B-cells suspended in culture medium (RPMI 1640 containing 10% FBS, 5×10⁻⁵M 2ME, 100U/ml penicillin, 10 ug/ml streptomycin, and 10⁻⁵ dilution of SAC) in a total volume of 150 ul. Proliferation or inhibition is quantitated by a 20 h pulse (1 uCi/well) with 3H-thymidine (6.7 Ci/mM) beginning 72 h post factor addition. The positive and negative controls are IL2 and medium respectively.

[1107] In Vivo Assay—BALB/c mice are injected (i.p.) twice per day with buffer only, or 2 mg/Kg of agonists or antagonists of the invention, or truncated forms thereof. Mice receive this treatment for 4 consecutive days, at which time they are sacrificed and various tissues and serum collected for analyses. Comparison of H&E sections from normal spleens and spleens treated with agonists or antagonists of the invention identify the results of the activity of the agonists or antagonists on spleen cells, such as the diffusion of peri-arterial lymphatic sheaths, and/or significant increases in the nucleated cellularity of the red pulp regions, which may indicate the activation of the differentiation and proliferation of B-cell populations. Immunohistochemical studies using a B cell marker, anti-CD45R(B220), are used to determine whether any physiological changes to splenic cells, such as splenic disorganization, are due to increased B-cell representation within loosely defined B-cell zones that infiltrate established T-cell regions.

[1108] Flow cytometric analyses of the spleens from mice treated with agonist or antagonist is used to indicate whether the agonists or antagonists specifically increases the proportion of ThB+, CD45R(B220)dull B cells over that which is observed in control mice.

[1109] Likewise, a predicted consequence of increased mature B-cell representation in vivo is a relative increase in serum Ig titers. Accordingly, serum IgM and IgA levels are compared between buffer and agonists or antagonists-treated mice.

[1110] The studies described in this example tested activity of agonists or antagonists of the invention. However, one skilled in the art could easily modify the exemplified studies to test the activity of polynucleotides or polypeptides of the invention (e.g., gene therapy).

### Example 22

### T Cell Proliferation Assay

[1111] A CD3-induced proliferation assay is performed on PBMCs and is measured by the uptake of ³H-thymidine. The assay is performed as follows. Ninety-six well plates are coated with 100 μl/well of mAb to CD3 (HIT3a, Pharmingen) or isotype-matched control mAb (B33.1) overnight at 4 degrees C. (1 μg/ml in 0.05M bicarbonate buffer, pH 9.5), then washed three times with PBS. PBMC are isolated by F/H gradient centrifugation from human peripheral blood and added to quadruplicate wells (5×10⁴/well) of mAb coated plates in RPMI containing 10% FCS and P/S in the presence of varying concentrations of agonists or antagonists of the invention (total volume 200 ul). Relevant protein buffer and medium alone are controls. After 48 hr. culture at 37 degrees C., plates are spun for 2 min. at 1000 rpm and 100 μl of supernatant is removed and stored −20 degrees C. for measurement of IL-2 (or other cytokines) if effect on proliferation is observed. Wells are supplemented with 100 ul of medium containing 0.5 uCi of ³H-thymidine and cultured at 37 degrees C. for 18-24 hr. Wells are harvested and incorporation of ³H-thymidine used as a measure of proliferation. Anti-CD3 alone is the positive control for proliferation. IL-2 (100 U/ml) is also used as a control which enhances proliferation. Control antibody which does not induce proliferation of T cells is used as the negative control for the effects of agonists or antagonists of the invention.

[1112] The studies described in this example tested activity of agonists or antagonists of the invention. However, one skilled in the art could easily modify the exemplified studies to test the activity of polynucleotides or polypeptides of the invention (e.g., gene therapy).

### Example 23

[1113] Effect of Agonists or Antagonists of the Invention on the Expression of MHC Class II, Costimulatory and Adhesion Molecules and Cell Differentiation of Monocytes and Monocyte-Derived Human Dendritic Cells

[1114] Dendritic cells are generated by the expansion of proliferating precursors found in the peripheral blood: adherent PBMC or elutriated monocytic fractions are cultured for 7-10 days with GM-CSF (50 ng/ml) and IL-4 (20 ng/ml). These dendritic cells have the characteristic phenotype of immature cells (expression of CD1, CD80, CD86, CD40 and MHC class II antigens). Treatment with activating factors, such as TNF-α, causes a rapid change in surface phenotype (increased expression of MHC class I and II, costimulatory and adhesion molecules, downregulation of FCγ RII, upregulation of CD83). These changes correlate with increased antigen-presenting capacity and with functional maturation of the dendritic cells.

[1115] FACS analysis of surface antigens is performed as follows. Cells are treated 1-3 days with increasing concentrations of agonist or antagonist of the invention or LPS (positive control), washed with PBS containing 1% BSA and 0.02 mM sodium azide, and then incubated with 1:20 dilution of appropriate FITC— or PE-labeled monoclonal antibodies for 30 minutes at 4 degrees C. After an additional wash, the labeled cells are analyzed by flow cytometry on a FACScan (Becton Dickinson).

[1116] Effect on the production of cytokines. Cytokines generated by dendritic cells, in particular IL-12, are important in the initiation of T-cell dependent immune responses. IL-12 strongly influences the development of Th1 helper T-cell immune response, and induces cytotoxic T and NK cell function. An ELISA is used to measure the IL-12 release as follows. Dendritic cells (10⁶/ml) are treated with increasing concentrations of agonists or antagonists of the invention for 24 hours. LPS (100 ng/ml) is added to the cell culture as positive control. Supernatants from the cell cultures are then collected and analyzed for IL-12 content using commercial ELISA kit (e.g., R & D Systems (Minneapolis, Minn.)). The standard protocols provided with the kits are used.

[1117] Effect on the expression of MHC Class II, costimulatory and adhesion molecules. Three major families of cell surface antigens can be identified on monocytes: adhesion molecules, molecules involved in antigen presentation, and Fc receptor. Modulation of the expression of MHC class II antigens and other costimulatory molecules, such as B7 and ICAM-1, may result in changes in the antigen presenting capacity of monocytes and ability to induce T cell activation. Increased expression of Fc receptors may correlate with improved monocyte cytotoxic activity, cytokine release and phagocytosis.

[1118] FACS analysis is used to examine the surface antigens as follows. Monocytes are treated 1-5 days with increasing concentrations of agonists or antagonists of the invention or LPS (positive control), washed with PBS containing 1% BSA and 0.02 mM sodium azide, and then incubated with 1:20 dilution of appropriate FITC- or PE-labeled monoclonal antibodies for 30 minutes at 4 degrees C. After an additional wash, the labeled cells are analyzed by flow cytometry on a FACScan (Becton Dickinson).

[1119] Monocyte activation and/or increased survival. Assays for molecules that activate (or alternatively, inactivate) monocytes and/or increase monocyte survival (or alternatively, decrease monocyte survival) are known in the art and may routinely be applied to determine whether a molecule of the invention functions as an inhibitor or activator of monocytes. Agonists or antagonists of the invention can be screened using the three assays described below. For each of these assays, Peripheral blood mononuclear cells (PBMC) are purified from single donor leukopacks (American Red Cross, Baltimore, Md.) by centrifugation through a Histopaque gradient (Sigma). Monocytes are isolated from PBMC by counterflow centrifugal elutriation.

[1120] Monocyte Survival Assay. Human peripheral blood monocytes progressively lose viability when cultured in absence of serum or other stimuli. Their death results from internally regulated processes (apoptosis). Addition to the culture of activating factors, such as TNF-alpha dramatically improves cell survival and prevents DNA fragmentation. Propidium iodide (PI) staining is used to measure apoptosis as follows. Monocytes are cultured for 48 hours in polypropylene tubes in serum-free medium (positive control), in the presence of 100 ng/ml TNF-alpha (negative control), and in the presence of varying concentrations of the compound to be tested. Cells are suspended at a concentration of 2×10⁶/ml in PBS containing PI at a final concentration of 5 μg/ml, and then incubated at room temperature for 5 minutes before FACScan analysis. PI uptake has been demonstrated to correlate with DNA fragmentation in this experimental paradigm.

[1121] Effect on cytokine release. An important function of monocytes/macrophages is their regulatory activity on other cellular populations of the immune system through the release of cytokines after stimulation. An ELISA to measure cytokine release is performed as follows. Human monocytes are incubated at a density of 5×10⁵ cells/ml with increasing concentrations of agonists or antagonists of the invention and under the same conditions, but in the absence of agonists or antagonists. For IL-12 production, the cells are primed overnight with IFN (100 U/ml) in the presence of agonist or antagonist of the invention. LPS (10 ng/ml) is then added. Conditioned media are collected after 24 h and kept frozen until use. Measurement of TNF-alpha, IL-10, MCP-1 and IL-8 is then performed using a commercially available ELISA kit (e.g., R & D Systems (Minneapolis, Minn.)) and applying the standard protocols provided with the kit.

[1122] Oxidative burst. Purified monocytes are plated in 96-w plate at 2-1×10⁵ cell/well. Increasing concentrations of agonists or antagonists of the invention are added to the wells in a total volume of 0.2 ml culture medium (RPMI 1640+10% FCS, glutamine and antibiotics). After 3 days incubation, the plates are centrifuged and the medium is removed from the wells. To the macrophage monolayers, 0.2 ml per well of phenol red solution (140 mM NaCl, 10 mM potassium phosphate buffer pH 7.0, 5.5 mM dextrose, 0.56 mM phenol red and 19 U/ml of HRPO) is added, together with the stimulant (200 nM PMA). The plates are incubated at 37° C. for 2 hours and the reaction is stopped by adding 20 μl 1N NaOH per well. The absorbance is read at 610 nm. To calculate the amount of H₂O₂ produced by the macrophages, a standard curve of a H₂O₂ solution of known molarit is performed for each experiment.

[1123] The studies described in this example tested activity of agonists or antagonists of the invention. However, one skilled in the art could easily modify the exemplified studies to test the activity of polynucleotides or polypeptides of the invention (e.g., gene therapy).

### Example 24

### Biological Effects of Agonists or Antagonists of the Invention

[1124] Astrocyte and Neuronal Assays.

[1125] Agonists or antagonists of the invention, expressed in Escherichia coli and purified as described above, can be tested for activity in promoting the survival, neurite outgrowth, or phenotypic differentiation of cortical neuronal cells and for inducing the proliferation of glial fibrillary acidic protein immunopositive cells, astrocytes. The selection of cortical cells for the bioassay is based on the prevalent expression of FGF-1 and FGF-2 in cortical structures and on the previously reported enhancement of cortical neuronal survival resulting from FGF-2 treatment. A thymidine incorporation assay, for example, can be used to elucidate an agonist or antagonist of the invention's activity on these cells.

[1126] Moreover, previous reports describing the biological effects of FGF-2 (basic FGF) on cortical or hippocampal neurons in vitro have demonstrated increases in both neuron survival and neurite outgrowth (Walicke et al., “Fibroblast growth factor promotes survival of dissociated hippocampal neurons and enhances neurite extension.” Proc. Natl. Acad. Sci. USA 83:3012-3016. (1986), assay herein incorporated by reference in its entirety). However, reports from experiments done on PC-12 cells suggest that these two responses are not necessarily synonymous and may depend on not only which FGF is being tested but also on which receptor(s) are expressed on the target cells. Using the primary cortical neuronal culture paradigm, the ability of an agonist or antagonist of the invention to induce neurite outgrowth can be compared to the response achieved with FGF-2 using, for example, a thymidine incorporation assay.

[1127] Fibroblast and Endothelial Cell Assays.

[1128] Human lung fibroblasts are obtained from Clonetics (San Diego, Calif.) and maintained in growth media from Clonetics. Dermal microvascular endothelial cells are obtained from Cell Applications (San Diego, Calif.). For proliferation assays, the human lung fibroblasts and dermal microvascular endothelial cells can be cultured at 5,000 cells/well in a 96-well plate for one day in growth medium. The cells are then incubated for one day in 0.1% BSA basal medium. After replacing the medium with fresh 0.1% BSA medium, the cells are incubated with the test proteins for 3 days. Alamar Blue (Alamar Biosciences, Sacramento, Calif.) is added to each well to a final concentration of 10%. The cells are incubated for 4 hr. Cell viability is measured by reading in a CytoFluor fluorescence reader. For the PGE₂ assays, the human lung fibroblasts are cultured at 5,000 cells/well in a 96-well plate for one day. After a medium change to 0.1% BSA basal medium, the cells are incubated with FGF-2 or agonists or antagonists of the invention with or without IL-1a for 24 hours. The supernatants are collected and assayed for PGE₂ by EIA kit (Cayman, Ann Arbor, Mich.). For the IL-6 assays, the human lung fibroblasts are cultured at 5,000 cells/well in a 96-well plate for one day. After a medium change to 0.1% BSA basal medium, the cells are incubated with FGF-2 or with or without agonists or antagonists of the invention IL-1α for 24 hours. The supernatants are collected and assayed for IL-6 by ELISA kit (Endogen, Cambridge, Mass.).

[1129] Human lung fibroblasts are cultured with FGF-2 or agonists or antagonists of the invention for 3 days in basal medium before the addition of Alamar Blue to assess effects on growth of the fibroblasts. FGF-2 should show a stimulation at 10-2500 ng/ml which can be used to compare stimulation with agonists or antagonists of the invention.

[1130] Parkinson Models.

[1131] The loss of motor function in Parkinson's disease is attributed to a deficiency of striatal dopamine resulting from the degeneration of the nigrostriatal dopaminergic projection neurons. An animal model for Parkinson's that has been extensively characterized involves the systemic administration of 1-methyl-4 phenyl 1,2,3,6-tetrahydropyridine (MPTP). In the CNS, MPTP is taken-up by astrocytes and catabolized by monoamine oxidase B to 1-methyl-4-phenyl pyridine (MPP+) and released. Subsequently, MPP⁺ is actively accumulated in dopaminergic neurons by the high-affinity reuptake transporter for dopamine. MPP⁺ is then concentrated in mitochondria by the electrochemical gradient and selectively inhibits nicotidamide adenine disphosphate: ubiquinone oxidoreductionase (complex I), thereby interfering with electron transport and eventually generating oxygen radicals.

[1132] It has been demonstrated in tissue culture paradigms that FGF-2 (basic FGF) has trophic activity towards nigral dopaminergic neurons (Ferrari et al., Dev. Biol. 1989). Recently, Dr. Unsicker's group has demonstrated that administering FGF-2 in gel foam implants in the striatum results in the near complete protection of nigral dopaminergic neurons from the toxicity associated with MPTP exposure (Otto and Unsicker, J. Neuroscience, 1990).

[1133] Based on the data with FGF-2, agonists or antagonists of the invention can be evaluated to determine whether it has an action similar to that of FGF-2 in enhancing dopaminergic neuronal survival in vitro and it can also be tested in vivo for protection of dopaminergic neurons in the striatum from the damage associated with MPTP treatment. The potential effect of an agonist or antagonist of the invention is first examined in vitro in a dopaminergic neuronal cell culture paradigm. The cultures are prepared by dissecting the midbrain floor plate from gestation day 14 Wistar rat embryos. The tissue is dissociated with trypsin and seeded at a density of 200,000 cells/cm² on polyorthinine-laminin coated glass coverslips. The cells are maintained in Dulbecco's Modified Eagle's medium and F12 medium containing hormonal supplements (N1). The cultures are fixed with paraformaldehyde after 8 days in vitro and are processed for tyrosine hydroxylase, a specific marker for dopaminergic neurons, immunohistochemical staining. Dissociated cell cultures are prepared from embryonic rats. The culture medium is changed every third day and the factors are also added at that time.

[1134] Since the dopaminergic neurons are isolated from animals at gestation day 14, a developmental time which is past the stage when the dopaminergic precursor cells are proliferating, an increase in the number of tyrosine hydroxylase immunopositive neurons would represent an increase in the number of dopaminergic neurons surviving in vitro. Therefore, if an agonist or antagonist of the invention acts to prolong the survival of dopaminergic neurons, it would suggest that the agonist or antagonist may be involved in Parkinson's Disease.

[1135] The studies described in this example tested activity of agonists or antagonists of the invention. However, one skilled in the art could easily modify the exemplified studies to test the activity of polynucleotides or polypeptides of the invention (e.g., gene therapy).

### Example 25

### The Effect of Agonists or Antagonists of the Invention on the Growth of Vascular Endothelial Cells

[1136] On day 1, human umbilical vein endothelial cells (HUVEC) are seeded at 2-5×10⁴ cells/35 mm dish density in M199 medium containing 4% fetal bovine serum (FBS), 16 units/ml heparin, and 50 units/ml endothelial cell growth supplements (ECGS, Biotechnique, Inc.). On day 2, the medium is replaced with M199 containing 10% FBS, 8 units/ml heparin. An agonist or antagonist of the invention, and positive controls, such as VEGF and basic FGF (bFGF) are added, at varying concentrations. On days 4 and 6, the medium is replaced. On day 8, cell number is determined with a Coulter Counter.

[1137] An increase in the number of HUVEC cells indicates that the compound of the invention may proliferate vascular endothelial cells, while a decrease in the number of HUVEC cells indicates that the compound of the invention inhibits vascular endothelial cells.

[1138] The studies described in this example tested activity of a polypeptide of the invention. However, one skilled in the art could easily modify the exemplified studies to test the activity of polynucleotides (e.g., gene therapy), agonists, and/or antagonists of the invention.

### Example 26

### Rat Corneal Wound Healing Model

[1139] This animal model shows the effect of an agonist or antagonist of the invention on neovascularization. The experimental protocol includes:

[1140] Making a 1-1.5 mm long incision from the center of cornea into the stromal layer.

[1141] Inserting a spatula below the lip of the incision facing the outer corner of the eye.

[1142] Making a pocket (its base is 1-1.5 mm form the edge of the eye).

[1143] Positioning a pellet, containing 50 ng-5 ug of an agonist or antagonist of the invention, within the pocket.

[1144] Treatment with an agonist or antagonist of the invention can also be applied topically to the corneal wounds in a dosage range of 20 mg-500 mg (daily treatment for five days).

[1145] The studies described in this example tested activity of agonists or antagonists of the invention. However, one skilled in the art could easily modify the exemplified studies to test the activity of polynucleotides or polypeptides of the invention (e.g., gene therapy).

### Example 27

### Diabetic Mouse and Glucocorticoid-Impaired Wound Healing Models

[1146] Diabetic db+/db+ Mouse Model.

[1147] To demonstrate that an agonist or antagonist of the invention accelerates the healing process, the genetically diabetic mouse model of wound healing is used. The full thickness wound healing model in the db+/db+ mouse is a well characterized, clinically relevant and reproducible model of impaired wound healing. Healing of the diabetic wound is dependent on formation of granulation tissue and re-epithelialization rather than contraction (Gartner, M. H. et al., J. Surg. Res. 52:389 (1992); Greenhalgh, D. G. et al., Am. J. Pathol. 136:1235 (1990)).

[1148] The diabetic animals have many of the characteristic features observed in Type II diabetes mellitus. Homozygous (db+/db+) mice are obese in comparison to their normal heterozygous (db+/+m) littermates. Mutant diabetic (db+/db+) mice have a single autosomal recessive mutation on chromosome 4 (db+) (Coleman et al. Proc. Natl. Acad. Sci. USA 77:283-293 (1982)). Animals show polyphagia, polydipsia and polyuria. Mutant diabetic mice (db+/db+) have elevated blood glucose, increased or normal insulin levels, and suppressed cell-mediated immunity (Mandel et al., J. Immunol. 120:1375 (1978); Debray-Sachs, M. et al., Clin. Exp. Immunol. 51(1):1-7 (1983); Leiter et al., Am. J. of Pathol. 114:46-55 (1985)). Peripheral neuropathy, myocardial complications, and microvascular lesions, basement membrane thickening and glomerular filtration abnormalities have been described in these animals (Norido, F. et al., Exp. Neurol. 83(2):221-232 (1984); Robertson et al., Diabetes 29(1):60-67 (1980); Giacomelli et al., Lab Invest. 40(4):460-473 (1979); Coleman, D. L., Diabetes 31 (Suppl):1-6 (1982)). These homozygous diabetic mice develop hyperglycemia that is resistant to insulin analogous to human type II diabetes (Mandel et al., J. Immunol. 120:1375-1377 (1978)).

[1149] The characteristics observed in these animals suggests that healing in this model may be similar to the healing observed in human diabetes (Greenhalgh, et al., Am. J. of Pathol. 136:1235-1246 (1990)).

[1150] Genetically diabetic female C57BL/KsJ (db+/db+) mice and their non-diabetic (db+/+m) heterozygous littermates are used in this study (Jackson Laboratories). The animals are purchased at 6 weeks of age and are 8 weeks old at the beginning of the study. Animals are individually housed and received food and water ad libitum. All manipulations are performed using aseptic techniques. The experiments are conducted according to the rules and guidelines of Human Genome Sciences, Inc. Institutional Animal Care and Use Committee and the Guidelines for the Care and Use of Laboratory Animals.

[1151] Wounding protocol is performed according to previously reported methods (Tsuboi, R. and Rifkin, D. B., J. Exp. Med. 172:245-251 (1990)). Briefly, on the day of wounding, animals are anesthetized with an intraperitoneal injection of Avertin (0.01 mg/mL), 2,2,2-tribromoethanol and 2-methyl-2-butanol dissolved in deionized water. The dorsal region of the animal is shaved and the skin washed with 70% ethanol solution and iodine. The surgical area is dried with sterile gauze prior to wounding. An 8 mm full-thickness wound is then created using a Keyes tissue punch. Immediately following wounding, the surrounding skin is gently stretched to eliminate wound expansion. The wounds are left open for the duration of the experiment. Application of the treatment is given topically for 5 consecutive days commencing on the day of wounding. Prior to treatment, wounds are gently cleansed with sterile saline and gauze sponges.

[1152] Wounds are visually examined and photographed at a fixed distance at the day of surgery and at two day intervals thereafter. Wound closure is determined by daily measurement on days 1-5 and on day 8. Wounds are measured horizontally and vertically using a calibrated Jameson caliper. Wounds are considered healed if granulation tissue is no longer visible and the wound is covered by a continuous epithelium.

[1153] An agonist or antagonist of the invention is administered using at a range different doses, from 4 mg to 500 mg per wound per day for 8 days in vehicle. Vehicle control groups received 50 mL of vehicle solution.

[1154] Animals are euthanized on day 8 with an intraperitoneal injection of sodium pentobarbital (300 mg/kg). The wounds and surrounding skin are then harvested for histology and immunohistochemistry. Tissue specimens are placed in 10% neutral buffered formalin in tissue cassettes between biopsy sponges for further processing.

[1155] Three groups of 10 animals each (5 diabetic and 5 non-diabetic controls) are evaluated: 1) Vehicle placebo control, 2) untreated group, and 3) treated group.

[1156] Wound closure is analyzed by measuring the area in the vertical and horizontal axis and obtaining the total square area of the wound. Contraction is then estimated by establishing the differences between the initial wound area (day 0) and that of post treatment (day 8). The wound area on day 1 is 64 mm², the corresponding size of the dermal punch. Calculations are made using the following formula:

[Open area on day 8]-[Open area on day 1]/[Open area on day 1]

[1157] Specimens are fixed in 10% buffered formalin and paraffin embedded blocks are sectioned perpendicular to the wound surface (5 mm) and cut using a Reichert-Jung microtome. Routine hematoxylin-eosin (H&E) staining is performed on cross-sections of bisected wounds. Histologic examination of the wounds are used to assess whether the healing process and the morphologic appearance of the repaired skin is altered by treatment with an agonist or antagonist of the invention. This assessment included verification of the presence of cell accumulation, inflammatory cells, capillaries, fibroblasts, re-epithelialization and epidermal maturity (Greenhalgh, D. G. et al., Am. J. Pathol. 136:1235 (1990)). A calibrated lens micrometer is used by a blinded observer.

[1158] Tissue sections are also stained immunohistochemically with a polyclonal rabbit anti-human keratin antibody using ABC Elite detection system. Human skin is used as a positive tissue control while non-immune IgG is used as a negative control. Keratinocyte growth is determined by evaluating the extent of reepithelialization of the wound using a calibrated lens micrometer.

[1159] Proliferating cell nuclear antigen/cyclin (PCNA) in skin specimens is demonstrated by using anti-PCNA antibody (1:50) with an ABC Elite detection system. Human colon cancer served as a positive tissue control and human brain tissue is used as a negative tissue control. Each specimen included a section with omission of the primary antibody and substitution with non-immune mouse IgG. Ranking of these sections is based on the extent of proliferation on a scale of 0-8, the lower side of the scale reflecting slight proliferation to the higher side reflecting intense proliferation.

[1160] Experimental data are analyzed using an unpaired t test. A p value of <0.05 is considered significant.

[1161] Steroid Impaired Rat Model

[1162] The inhibition of wound healing by steroids has been well documented in various in vitro and in vivo systems (Wahl, Glucocorticoids and Wound healing. In: Anti-Inflammatory Steroid Action: Basic and Clinical Aspects. 280-302 (1989); Wahl et al., J. Immunol. 115: 476-481 (1975); Werb et al., J. Exp. Med. 147:1684-1694 (1978)). Glucocorticoids retard wound healing by inhibiting angiogenesis, decreasing vascular permeability (Ebert et al., An. Intern. Med. 37:701-705 (1952)), fibroblast proliferation, and collagen synthesis (Beck et al., Growth Factors. 5: 295-304 (1991); Haynes et al., J. Clin. Invest. 61: 703-797 (1978)) and producing a transient reduction of circulating monocytes (Haynes et al., J. Clin. Invest. 61: 703-797 (1978); Wahl, “Glucocorticoids and wound healing”, In: Antiinflammatory Steroid Action: Basic and Clinical Aspects, Academic Press, New York, pp. 280-302 (1989)). The systemic administration of steroids to impaired wound healing is a well establish phenomenon in rats (Beck et al., Growth Factors. 5: 295-304 (1991); Haynes et al., J. Clin. Invest. 61: 703-797 (1978); Wahl, “Glucocorticoids and wound healing”, In: Antiinflammatory Steroid Action: Basic and Clinical Aspects, Academic Press, New York, pp. 280-302 (1989); Pierce et al., Proc. Natl. Acad. Sci. USA 86: 2229-2233 (1989)).

[1163] To demonstrate that an agonist or antagonist of the invention can accelerate the healing process, the effects of multiple topical applications of the agonist or antagonist on full thickness excisional skin wounds in rats in which healing has been impaired by the systemic administration of methylprednisolone is assessed.

[1164] Young adult male Sprague Dawley rats weighing 250-300 g (Charles River Laboratories) are used in this example. The animals are purchased at 8 weeks of age and are 9 weeks old at the beginning of the study. The healing response of rats is impaired by the systemic administration of methylprednisolone (17 mg/kg/rat intramuscularly) at the time of wounding. Animals are individually housed and received food and water ad libitum. All manipulations are performed using aseptic techniques. This study is conducted according to the rules and guidelines of Human Genome Sciences, Inc. Institutional Animal Care and Use Committee and the Guidelines for the Care and Use of Laboratory Animals.

[1165] The wounding protocol is followed according to section A, above. On the day of wounding, animals are anesthetized with an intramuscular injection of ketamine (50 mg/kg) and xylazine (5 mg/kg). The dorsal region of the animal is shaved and the skin-washed with 70% ethanol and iodine solutions. The surgical area is dried with sterile gauze prior to wounding. An 8 mm full-thickness wound is created using a Keyes tissue punch. The wounds are left open for the duration of the experiment. Applications of the testing materials are given topically once a day for 7 consecutive days commencing on the day of wounding and subsequent to methylprednisolone administration. Prior to treatment, wounds are gently cleansed with sterile saline and gauze sponges.

[1166] Wounds are visually examined and photographed at a fixed distance at the day of wounding and at the end of treatment. Wound closure is determined by daily measurement on days 1-5 and on day 8. Wounds are measured horizontally and vertically using a calibrated Jameson caliper. Wounds are considered healed if granulation tissue is no longer visible and the wound is covered by a continuous epithelium.

[1167] The agonist or antagonist of the invention is administered using at a range different doses, from 4 mg to 500 mg per wound per day for 8 days in vehicle. Vehicle control groups received 50 mL of vehicle solution.

[1168] Animals are euthanized on day 8 with an intraperitoneal injection of sodium pentobarbital (300 mg/kg). The wounds and surrounding skin are then harvested for histology. Tissue specimens are placed in 10% neutral buffered formalin in tissue cassettes between biopsy sponges for further processing.

[1169] Three groups of 10 animals each (5 with methylprednisolone and 5 without glucocorticoid) are evaluated: 1) Untreated group 2) Vehicle placebo control 3) treated groups.

[1170] Wound closure is analyzed by measuring the area in the vertical and horizontal axis and obtaining the total area of the wound. Closure is then estimated by establishing the differences between the initial wound area (day 0) and that of post treatment (day 8). The wound area on day 1 is 64 mm², the corresponding size of the dermal punch. Calculations are made using the following formula:

[Open area on day 8]−[Open area on day 1]/[Open area on day 1]

[1171] Specimens are fixed in 10% buffered formalin and paraffin embedded blocks are sectioned perpendicular to the wound surface (5 mm) and cut using an Olympus microtome. Routine hematoxylin-eosin (H&E) staining is performed on cross-sections of bisected wounds. Histologic examination of the wounds allows assessment of whether the healing process and the morphologic appearance of the repaired skin is improved by treatment with an agonist or antagonist of the invention. A calibrated lens micrometer is used by a blinded observer to determine the distance of the wound gap.

[1172] Experimental data are analyzed using an unpaired t test. A p value of <0.05 is considered significant.

[1173] The studies described in this example tested activity of agonists or antagonists of the invention. However, one skilled in the art could easily modify the exemplified studies to test the activity of polynucleotides or polypeptides of the invention (e.g., gene therapy).

### Example 28

### Lymphadema Animal Model

[1174] The purpose of this experimental approach is to create an appropriate and consistent lymphedema model for testing the therapeutic effects of an agonist or antagonist of the invention in lymphangiogenesis and re-establishment of the lymphatic circulatory system in the rat hind limb. Effectiveness is measured by swelling volume of the affected limb, quantification of the amount of lymphatic vasculature, total blood plasma protein, and histopathology. Acute lymphedema is observed for 7-10 days. Perhaps more importantly, the chronic progress of the edema is followed for up to 3-4 weeks.

[1175] Prior to beginning surgery, blood sample is drawn for protein concentration analysis. Male rats weighing approximately ˜350 g are dosed with Pentobarbital. Subsequently, the right legs are shaved from knee to hip. The shaved area is swabbed with gauze soaked in 70% EtOH. Blood is drawn for serum total protein testing. Circumference and volumetric measurements are made prior to injecting dye into paws after marking 2 measurement levels (0.5 cm above heel, at mid-pt of dorsal paw). The intradermal dorsum of both right and left paws are injected with 0.05 ml of 1% Evan's Blue. Circumference and volumetric measurements are then made following injection of dye into paws.

[1176] Using the knee joint as a landmark, a mid-leg inguinal incision is made circumferentially allowing the femoral vessels to be located. Forceps and hemostats are used to dissect and separate the skin flaps. After locating the femoral vessels, the lymphatic vessel that runs along side and underneath the vessel(s) is located. The main lymphatic vessels in this area are then electrically coagulated or suture ligated.

[1177] Using a microscope, muscles in back of the leg (near the semitendinosis and adductors) are bluntly dissected. The popliteal lymph node is then located. The 2 proximal and 2 distal lymphatic vessels and distal blood supply of the popliteal node are then ligated by suturing. The popliteal lymph node, and any accompanying adipose tissue, is then removed by cutting connective tissues.

[1178] Care is taken to control any mild bleeding resulting from this procedure. After lymphatics are occluded, the skin flaps are sealed by using liquid skin (Vetbond) (AJ Buck). The separated skin edges are sealed to the underlying muscle tissue while leaving a gap of ˜0.5 cm around the leg. Skin also may be anchored by suturing to underlying muscle when necessary.

[1179] To avoid infection, animals are housed individually with mesh (no bedding). Recovering animals are checked daily through the optimal edematous peak, which typically occurred by day 5-7. The plateau edematous peak are then observed. To evaluate the intensity of the lymphedema, the circumference and volumes of 2 designated places on each paw before operation and daily for 7 days are measured. The effect of plasma proteins on lymphedema is determined and whether protein analysis is a useful testing perimeter is also investigated. The weights of both control and edematous limbs are evaluated at 2 places. Analysis is performed in a blind manner.

[1180] Circumference Measurements: Under brief gas anesthetic to prevent limb movement, a cloth tape is used to measure limb circumference. Measurements are done at the ankle bone and dorsal paw by 2 different people and those 2 readings are averaged. Readings are taken from both control and edematous limbs.

[1181] Volumetric Measurements: On the day of surgery, animals are anesthetized with Pentobarbital and are tested prior to surgery. For daily volumetrics animals are under brief halothane anesthetic (rapid immobilization and quick recovery), and both legs are shaved and equally marked using waterproof marker on legs. Legs are first dipped in water, then dipped into instrument to each marked level, then measured by Buxco edema software(Chen/Victor). Data is recorded by one person, while the other is dipping the limb to marked area.

[1182] Blood-plasma protein measurements: Blood is drawn, spun, and serum separated prior to surgery and then at conclusion for total protein and Ca²⁺ comparison.

[1183] Limb Weight Comparison: After drawing blood, the animal is prepared for tissue collection. The limbs are amputated using a quillitine, then both experimental and control legs are cut at the ligature and weighed. A second weighing is done as the tibio-cacaneal joint is disarticulated and the foot is weighed.

[1184] Histological Preparations: The transverse muscle located behind the knee (popliteal) area is dissected and arranged in a metal mold, filled with freezeGel, dipped into cold methylbutane, placed into labeled sample bags at −80EC until sectioning. Upon sectioning, the muscle is observed under fluorescent microscopy for lymphatics.

[1185] The studies described in this example tested activity of agonists or antagonists of the invention. However, one skilled in the art could easily modify the exemplified studies to test the activity of polynucleotides or polypeptides of the invention (e.g., gene therapy).

### Example 29

### Suppression of TNF Alpha-Induced Adhesion Molecule Expression by a Agonist or Antagonist of the Invention

[1186] The recruitment of lymphocytes to areas of inflammation and angiogenesis involves specific receptor-ligand interactions between cell surface adhesion molecules (CAMs) on lymphocytes and the vascular endothelium. The adhesion process, in both normal and pathological settings, follows a multi-step cascade that involves intercellular adhesion molecule-1 (ICAM-1), vascular cell adhesion molecule-1 (VCAM-1), and endothelial leukocyte adhesion molecule-1 (E-selectin) expression on endothelial cells (EC). The expression of these molecules and others on the vascular endothelium determines the efficiency with which leukocytes may adhere to the local vasculature and extravasate into the local tissue during the development of an inflammatory response. The local concentration of cytokines and growth factor participate in the modulation of the expression of these CAMs.

[1187] Tumor necrosis factor alpha (TNF-a), a potent proinflammatory cytokine, is a stimulator of all three CAMs on endothelial cells and may be involved in a wide variety of inflammatory responses, often resulting in a pathological outcome.

[1188] The potential of an agonist or antagonist of the invention to mediate a suppression of TNF-a induced CAM expression can be examined. A modified ELISA assay which uses ECs as a solid phase absorbent is employed to measure the amount of CAM expression on TNF-a treated ECs when co-stimulated with a member of the FGF family of proteins.

[1189] To perform the experiment, human umbilical vein endothelial cell (HUVEC) cultures are obtained from pooled cord harvests and maintained in growth medium (EGM-2; Clonetics, San Diego, Calif.) supplemented with 10% FCS and 1% penicillin/streptomycin in a 37 degree C. humidified incubator containing 5% CO₂. HUVECs are seeded in 96-well plates at concentrations of 1×10⁴ cells/well in EGM medium at 37 degree C. for 18-24 hrs or until confluent. The monolayers are subsequently washed 3 times with a serum-free solution of RPMI-1640 supplemented with 100 U/ml penicillin and 100 mg/ml streptomycin, and treated with a given cytokine and/or growth factor(s) for 24 h at 37 degree C. Following incubation, the cells are then evaluated for CAM expression.

[1190] Human Umbilical Vein Endothelial cells (HUVECs) are grown in a standard 96 well plate to confluence. Growth medium is removed from the cells and replaced with 90 ul of 199 Medium (10% FBS). Samples for testing and positive or negative controls are added to the plate in triplicate (in 10 ul volumes). Plates are incubated at 37 degree C. for either 5 h (selectin and integrin expression) or 24 h (integrin expression only). Plates are aspirated to remove medium and 100 μl of 0.1% paraformaldehyde-PBS(with Ca++ and Mg++) is added to each well. Plates are held at 4° C. for 30 min.

[1191] Fixative is then removed from the wells and wells are washed 1× with PBS(+Ca,Mg)+0.5% BSA and drained. Do not allow the wells to dry. Add 10 μl of diluted primary antibody to the test and control wells. Anti-ICAM-1-Biotin, Anti-VCAM-1-Biotin and Anti-E-selectin-Biotin are used at a concentration of 10 μg/ml (1:10 dilution of 0.1 mg/ml stock antibody). Cells are incubated at 37° C. for 30 min. in a humidified environment. Wells are washed ×3 with PBS(+Ca,Mg)+0.5% BSA.

[1192] Then add 20 μl of diluted ExtrAvidin-Alkaline Phosphotase (1:5,000 dilution) to each well and incubated at 37° C. for 30 min. Wells are washed ×3 with PBS(+Ca,Mg)+0.5% BSA. 1 tablet of p-Nitrophenot Phosphate pNPP is dissolved in 5 ml of glycine buffer (pH 10.4). 100 μl of pNPP substrate in glycine buffer is added to each test well. Standard wells in triplicate are prepared from the working dilution of the ExtrAvidin-Alkaline Phosphotase in glycine buffer: 1:5,000 (10⁰)>10^{-0.5}>10⁻¹>10^{-1.5}. 5 μl of each dilution is added to triplicate wells and the resulting AP content in each well is 5.50 ng, 1.74 ng, 0.55 ng, 0.18 ng. 100 μl of pNNP reagent must then be added to each of the standard wells. The plate must be incubated at 37° C. for 4 h. A volume of 50 μl of 3M NaOH is added to all wells. The results are quantified on a plate reader at 405 nm. The background subtraction option is used on blank wells filled with glycine buffer only. The template is set up to indicate the concentration of AP-conjugate in each standard well [5.50 ng; 1.74 ng; 0.55 ng; 0.18 ng]. Results are indicated as amount of bound AP-conjugate in each sample.

[1193] The studies described in this example tested activity of agonists or antagonists of the invention. However, one skilled in the art could easily modify the exemplified studies to test the activity of polynucleotides or polypeptides of the invention (e.g., gene therapy).

### Example 30

### Production of Polypeptide of the Invention for High-Throughput Screening Assays

[1194] The following protocol produces a supernatant containing polypeptide of the present invention to be tested. This supernatant can then be used in the Screening Assays described in Examples 32-41.

[1195] First, dilute Poly-D-Lysine (644 587 Boehringer-Mannheim) stock solution (1 mg/ml in PBS) 1:20 in PBS (w/o calcium or magnesium 17-516F Biowhittaker) for a working solution of 50 ug/ml. Add 200 ul of this solution to each well (24 well plates) and incubate at RT for 20 minutes. Be sure to distribute the solution over each well (note: a 12-channel pipetter may be used with tips on every other channel). Aspirate off the Poly-D-Lysine solution and rinse with 1 ml PBS (Phosphate Buffered Saline). The PBS should remain in the well until just prior to plating the cells and plates may be poly-lysine coated in advance for up to two weeks.

[1196] Plate 293T cells (do not carry cells past P+20) at 2×10⁵ cells/well in 0.5 ml DMEM(Dulbecco's Modified Eagle Medium)(with 4.5 G/L glucose and L-glutamine (12-604F Biowhittaker))/10% heat inactivated FBS(14-503F Biowhittaker)/1×Penstrep(17-602E Biowhittaker). Let the cells grow overnight.

[1197] The next day, mix together in a sterile solution basin: 300 ul Lipofectamine (18324-012 Gibco/BRL) and 5 ml Optimem 1 (31985070 Gibco/BRL)/96-well plate. With a small volume multi-channel pipetter, aliquot approximately 2 ug of an expression vector containing a polynucleotide insert, produced by the methods described in Examples 8-10, into an appropriately labeled 96-well round bottom plate. With a multi-channel pipetter, add 50 ul of the Lipofectamine/Optimem I mixture to each well. Pipette up and down gently to mix. Incubate at RT 15-45 minutes. After about 20 minutes, use a multi-channel pipetter to add 150 ul Optimem I to each well. As a control, one plate of vector DNA lacking an insert should be transfected with each set of transfections.

[1198] Preferably, the transfection should be performed by tag-teaming the following tasks. By tag-teaming, hands on time is cut in half, and the cells do not spend too much time on PBS. First, person A aspirates off the media from four 24-well plates of cells, and then person B rinses each well with 0.5-1 ml PBS. Person A then aspirates off PBS rinse, and person B, using al2-channel pipetter with tips on every other channel, adds the 200 ul of DNA/LipofectaminelOptimem I complex to the odd wells first, then to the even wells, to each row on the 24-well plates. Incubate at 37 degree C. for 6 hours.

[1199] While cells are incubating, prepare appropriate media, either 1%BSA in DMEM with 1×penstrep, or HGS CHO-5 media (116.6 mg/L of CaCl₂ (anhyd); 0.00130 mg/L CuSO₄.5H₂O; 0.050 mg/L of Fe(NO₃)₃-9H₂O; 0.417 mg/L of FeSO₄-7H₂O; 311.80 mg/L of Kcl; 28.64 mg/L of MgCl₂; 48.84 mg/L of MgSO₄; 6995.50 mg/L of NaCl; 2400.0 mg/L of NaHCO₃; 62.50 mg/L of NaH₂PO₄—H₂O; 71.02 mg/L of Na₂HPO4; 0.4320 mg/L of ZnSO4-7H2O; 0.002 mg/L of Arachidonic Acid; 1.022 mg/L of Cholesterol; 0.070 mg/L of DL-alpha-Tocopherol-Acetate; 0.0520 mg/L of Linoleic Acid; 0.010 mg/L of Linolenic Acid; 0.010 mg/L of Myristic Acid; 0.010 mg/L of Oleic Acid; 0.010 mgl of Palmitric Acid; 0.010 mg/L of Palmitic Acid; 100 mg/L of Pluronic F-68; 0.010 mg/L of Stearic Acid; 2.20 mg/L of Tween 80; 4551 mg/L of D-Glucose; 130.85 mg/ml of L-Alanine; 147.50 mg/ml of L-Arginine-HCL; 7.50 mg/ml of L-Asparagine-H₂O; 6.65 mg/ml of L-Aspartic Acid; 29.56 mg/ml of L-Cystine-2HCL-H₂O; 31.29 mg/ml of L-Cystine-2HCL; 7.35 mg/ml of L-Glutamic Acid; 365.0 mg/ml of L-Glutamine; 18.75 mg/ml of Glycine; 52.48 mg/ml of L-Histidine-HCL-H₂O; 106.97 mg/ml of L-Isoleucine; 111.45 mg/ml of L-Leucine; 163.75 mg/ml of L-Lysine HCL; 32.34 mg/ml of L-Methionine; 68.48 mg/ml of L-Phenylalainine; 40.0 mg/ml of L-Proline; 26.25 mg/ml of L-Serine; 101.05 mg/ml of L-Threonine; 19.22 mg/ml of L-Tryptophan; 91.79 mg/ml of L-Tryrosine-2Na-2H₂O; and 99.65 mg/ml of L-Valine; 0.0035 mg/L of Biotin; 3.24 mg/L of D-Ca Pantothenate; 11.78 mg/L of Choline Chloride; 4.65 mg/L of Folic Acid; 15.60 mg/L of i-Inositol; 3.02 mg/L of Niacinamide; 3.00 mg/L of Pyridoxal HCL; 0.031 mg/L of Pyridoxine HCL; 0.319 mg/L of Riboflavin; 3.17 mg/L of Thiamine HCL; 0.365 mg/L of Thymidine; 0.680 mg/L of Vitamin B12; 25 mM of HEPES Buffer; 2.39 mg/L of Na Hypoxanthine; 0.105 mg/L of Lipoic Acid; 0.081 mg/L of Sodium Putrescine-2HCL; 55.0 mg/L of Sodium Pyruvate; 0.0067 mg/L of Sodium Selenite; 20 uM of Ethanolamine; 0.122 mg/L of Ferric Citrate; 41.70 mg/L of Methyl-B-Cyclodextrin complexed with Linoleic Acid; 33.33 mgl of Methyl-B-Cyclodextrin complexed with Oleic Acid; 10 mg/L of Methyl-B-Cyclodextrin complexed with Retinal Acetate. Adjust osmolarity to 327 mOsm) with 2 mm glutamine and 1×penstrep. (BSA (81-068-3 Bayer) 100 gm dissolved in IL DMEM for a 10% BSA stock solution). Filter the media and collect 50 ul for endotoxin assay in 15 ml polystyrene conical.

[1200] The transfection reaction is terminated, preferably by tag-teaming, at the end of the incubation period. Person A aspirates off the transfection media, while person B adds 1.5 ml appropriate media to each well. Incubate at 37 degree C. for 45 or 72 hours depending on the media used: 1%BSA for 45 hours or CHO-5 for 72 hours.

[1201] On day four, using a 300 ul multichannel pipetter, aliquot 600 ul in one 1 ml deep well plate and the remaining supernatant into a 2 ml deep well. The supernatants from each well can then be used in the assays described in Examples 32-39.

[1202] It is specifically understood that when activity is obtained in any of the assays described below using a supernatant, the activity originates from either the polypeptide of the present invention directly (e.g., as a secreted protein) or by polypeptide of the present invention inducing expression of other proteins, which are then secreted into the supernatant. Thus, the invention further provides a method of identifying the protein in the supernatant characterized by an activity in a particular assay.

### Example 31

### Construction of GAS Reporter Construct

[1203] One signal transduction pathway involved in the differentiation and proliferation of cells is called the Jaks-STATs pathway. Activated proteins in the Jaks-STATs pathway bind to gamma activation site “GAS” elements or interferon-sensitive responsive element (“ISRE”), located in the promoter of many genes. The binding of a protein to these elements alter the expression of the associated gene.

[1204] GAS and ISRE elements are recognized by a class of transcription factors called Signal Transducers and Activators of Transcription, or “STATs.” There are six members of the STATs family. Stat1 and Stat3 are present in many cell types, as is Stat2 (as response to IFN-alpha is widespread). Stat4 is more restricted and is not in many cell types though it has been found in T helper class I, cells after treatment with IL-12. Stat5 was originally called mammary growth factor, but has been found at higher concentrations in other cells including myeloid cells. It can be activated in tissue culture cells by many cytokines.

[1205] The STATs are activated to translocate from the cytoplasm to the nucleus upon tyrosine phosphorylation by a set of kinases known as the Janus Kinase (“Jaks”) family. Jaks represent a distinct family of soluble tyrosine kinases and include Tyk2, Jak1, Jak2, and Jak3. These kinases display significant sequence similarity and are generally catalytically inactive in resting cells.

[1206] The Jaks are activated by a wide range of receptors summarized in the Table below. (Adapted from review by Schidler and Darnell, Ann. Rev. Biochem. 64:621-51 (1995).) A cytokine receptor family, capable of activating Jaks, is divided into two groups: (a) Class 1 includes receptors for IL-2, IL-3, IL-4, IL-6, IL-7, IL-9, IL-11, IL-12, IL-15, Epo, PRL, GH, G-CSF, GM-CSF, LIF, CNTF, and thrombopoietin; and (b) Class 2 includes IFN-a, IFN-g, and IL-10. The Class I receptors share a conserved cysteine motif (a set of four conserved cysteines and one tryptophan) and a WSXWS motif (a membrane proximal region encoding Trp-Ser-Xaa-Trp-Ser (SEQ ID NO:2)).

[1207] Thus, on binding of a ligand to a receptor, Jaks are activated, which in turn activate STATs, which then translocate and bind to GAS elements. This entire process is encompassed in the Jaks-STATs signal transduction pathway.

[1208] Therefore, activation of the Jaks-STATs pathway, reflected by the binding of the GAS or the ISRE element, can be used to indicate proteins involved in the proliferation and differentiation of cells. For example, growth factors and cytokines are known to activate the Jaks-STATs pathway. (See Table below.) Thus, by using GAS elements linked to reporter molecules, activators of the Jaks-STATs pathway can be identified.

| JAKs | STATS | GAS(elements) or ISRE | | | | |
|---|---|---|---|---|---|---|
| Ligand | tyk2 | Jak1 | Jak2 | Jak3 | | |
| IFN family | | | | | | |
| IFN-a/B | + | + | − | − | 1, 2, 3 | ISRE |
| IFN-g | | + | + | − | 1 | GAS(IRF1 > Lys6 > IFP) |
| Il-10 | + | ? | ? | − | 1, 3 | |
| gp130 family | | | | | | |
| IL-6(Pleiotropic) | + | + | + | ? | 1, 3 | GAS(IRF1 > Lys6 > IFP) |
| Il-11(Pleiotropic) | ? | + | ? | ? | 1, 3 | |
| OnM(Pleiotropic) | ? | + | + | ? | 1, 3 | |
| LIF(Pleiotropic) | ? | + | + | ? | 1, 3 | |
| CNTF(Pleiotropic) | −/+ | + | + | ? | 1, 3 | |
| G-CSF(Pleiotropic) | ? | + | ? | ? | 1, 3 | |
| IL-12(Pleiotropic) | + | − | + | + | 1, 3 | |
| g-C family | | | | | | |
| IL-2(lymphocytes) | − | + | − | + | 1, 3, 5 | GAS |
| IL-4(lymph/myeloid) | − | + | − | + | 6 | GAS(IRF1 = IFP > > Ly6)(IgH) |
| IL-7(lymphocytes) | − | + | − | + | 5 | GAS |
| IL-9(lymphocytes) | − | + | − | + | 5 | GAS |
| IL-13(lymphocyte) | − | + | ? | ? | 6 | GAS |
| IL-15 | ? | + | ? | + | 5 | GAS |
| gpl4O family | | | | | | |
| IL-3(myeloid) | − | − | + | − | 5 | GAS(IRF1 > IFP > > Ly6) |
| IL-5(myeloid) | − | − | + | − | 5 | GAS |
| GM-CSF(myeloid) | − | − | + | − | 5 | GAS |
| Growth hormone family | | | | | | |
| GH | ? | − | + | − | 5 | |
| PRL | ? | +/− | + | − | 1, 3, 5 | |
| EPO | ? | − | + | − | 5 | GAS(B-CAS > IRF1 = IFP > > Ly6) |
| Receptor Tyrosine Kinases | | | | | | |
| EGF | ? | + | + | − | 1, 3 | GAS(IRF1) |
| PDGF | ? | + | + | − | 1, 3 | |
| CSF-1 | ? | + | + | − | 1, 3 | GAS(not IRF1) |

[1209] To construct a synthetic GAS containing promoter element, which is used in the Biological Assays described in Examples 32-33, a PCR based strategy is employed to generate a GAS-SV40 promoter sequence. The 5′ primer contains four tandem copies of the GAS binding site found in the IRF1 promoter and previously demonstrated to bind STATs upon induction with a range of cytokines (Rothman et al., Immunity 1:457-468 (1994).), although other GAS or ISRE elements can be used instead. The 5′ primer also contains 1 bp of sequence complementary to the SV40 early promoter sequence and is flanked with an XhoI site. The sequence of the 5′ primer is:

(SEQ ID NO: 3)

5′:GCGCCTCGAGATTTCCCCGAAATCTAGATTTCCCCGAAATGATTTCC
CCGAAATGATTTCCCCGAAATATCTGCCATCTCAATTAG:3′

[1210] The downstream primer is complementary to the SV40 promoter and is flanked with a Hind III site: 5′:GCGGCAAGCTTTTTGCAAAGCCTAGGC:3′ (SEQ ID NO: 4)

[1211] PCR amplification is performed using the SV40 promoter template present in the B-gal:promoter plasmid obtained from Clontech. The resulting PCR fragment is digested with XhoI/Hind III and subcloned into BLSK2-. (Stratagene.) Sequencing with forward and reverse primers confirms that the insert contains the following sequence:

(SEQ ID NO: 5)

5′:CTCGAGATTTCCCCGAAATCTAGATTTCCCCGAAATGATTTCCCCGA
AATGATTTCCCCGAAATATCTGCCATCTCAATTAGTCAGCAACCATAGTC
CCGCCCCTAACTCCGCCCATCCCGCCCCTAACTCCGCCCAGTTCCGCCCA
TTCTCCGCCCCATGGCTGACTAATTTTTTTTATTTATGCAGAGGCCGAGG
CCGCCTCGGCCTCTGAGCTATTCCAGAAGTAGTGAGGAGGCTTTTTTGGA
GGCCTAGGCTTTTGCAAAAAGCTT:3′

[1212] With this GAS promoter element linked to the SV40 promoter, a GAS:SEAP2 reporter construct is next engineered. Here, the reporter molecule is a secreted alkaline phosphatase, or “SEAP.” Clearly, however, any reporter molecule can be used instead of SEAP, in this or in any of the other Examples. Well known reporter molecules that can be used instead of SEAP include chloramphenicol acetyltransferase (CAT), luciferase, alkaline phosphatase, B-galactosidase, green fluorescent protein (GFP), or any protein detectable by an antibody.

[1213] The above sequence confirmed synthetic GAS-SV40 promoter element is subcloned into the pSEAP-Promoter vector obtained from Clontech using HindIII and XhoI, effectively replacing the SV40 promoter with the amplified GAS:SV40 promoter element, to create the GAS-SEAP vector. However, this vector does not contain a neomycin resistance gene, and therefore, is not preferred for mammalian expression systems.

[1214] Thus, in order to generate mammalian stable cell lines expressing the GAS-SEAP reporter, the GAS-SEAP cassette is removed from the GAS-SEAP vector using SalI and NotI, and inserted into a backbone vector containing the neomycin resistance gene, such as pGFP-1 (Clontech), using these restriction sites in the multiple cloning site, to create the GAS-SEAP/Neo vector. Once this vector is transfected into mammalian cells, this vector can then be used as a reporter molecule for GAS binding as described in Examples 32-33.

[1215] Other constructs can be made using the above description and replacing GAS with a different promoter sequence. For example, construction of reporter molecules containing NFK-B and EGR promoter sequences are described in Examples 34 and 35. However, many other promoters can be substituted using the protocols described in these Examples. For instance, SRE, IL-2, NFAT, or Osteocalcin promoters can be substituted, alone or in combination (e.g., GAS/NF-KB/EGR, GAS/NF-KB, Il-2/NFAT, or NF-KB/GAS). Similarly, other cell lines can be used to test reporter construct activity, such as HELA (epithelial), HUVEC (endothelial), Reh (B-cell), Saos-2 (osteoblast), HUVAC (aortic), or Cardiomyocyte.

### Example 32

### High-Throughput Screening Assay for T-Cell Activity

[1216] The following protocol is used to assess T-cell activity by identifying factors, and determining whether supernate containing a polypeptide of the invention proliferates and/or differentiates T-cells. T-cell activity is assessed using the GAS/SEAP/Neo construct produced in Example 31. Thus, factors that increase SEAP activity indicate the ability to activate the Jaks-STATS signal transduction pathway. The T-cell used in this assay is Jurkat T-cells (ATCC Accession No. TIB-152), although Molt-3 cells (ATCC Accession No. CRL-1552) and Molt-4 cells (ATCC Accession No. CRL-1582) cells can also be used.

[1217] Jurkat T-cells are lymphoblastic CD4+ Th1 helper cells. In order to generate stable cell lines, approximately 2 million Jurkat cells are transfected with the GAS-SEAP/neo vector using DMRIE-C (Life Technologies)(transfection procedure described below). The transfected cells are seeded to a density of approximately 20,000 cells per well and transfectants resistant to 1 mg/ml genticin selected. Resistant colonies are expanded and then tested for their response to increasing concentrations of interferon gamma. The dose response of a selected clone is demonstrated.

[1218] Specifically, the following protocol will yield sufficient cells for 75 wells containing 200 ul of cells. Thus, it is either scaled up, or performed in multiple to generate sufficient cells for multiple 96 well plates. Jurkat cells are maintained in RPMI+10% serum with 1%Pen-Strep. Combine 2.5 mls of OPTI-MEM (Life Technologies) with 10 ug of plasmid DNA in a T25 flask. Add 2.5 ml OPTI-MEM containing 50 ul of DNIRIE-C and incubate at room temperature for 15-45 mins.

[1219] During the incubation period, count cell concentration, spin down the required number of cells (10⁷ per transfection), and resuspend in OPTI-MEM to a final concentration of 10⁷ cells/ml. Then add 1 ml of 1×10⁷ cells in OPTI-MEM to T25 flask and incubate at 37 degree C. for 6 hrs. After the incubation, add 10 ml of RPMI+15% serum.

[1220] The Jurkat:GAS-SEAP stable reporter lines are maintained in RPMI+10% serum, 1 mg/ml Genticin, and 1% Pen-Strep. These cells are treated with supernatants containing polypeptide of the present invention or polypeptide of the present invention induced polypeptides as produced by the protocol described in Example 30.

[1221] On the day of treatment with the supernatant, the cells should be washed and resuspended in fresh RPMI+10% serum to a density of 500,000 cells per ml. The exact number of cells required will depend on the number of supernatants being screened. For one 96 well plate, approximately 10 million cells (for 10 plates, 100 million cells) are required.

[1222] Transfer the cells to a triangular reservoir boat, in order to dispense the cells into a 96 well dish, using a 12 channel pipette. Using a 12 channel pipette, transfer 200 ul of cells into each well (therefore adding 100, 000 cells per well).

[1223] After all the plates have been seeded, 50 ul of the supernatants are transferred directly from the 96 well plate containing the supernatants into each well using a 12 channel pipette. In addition, a dose of exogenous interferon gamma (0.1, 1.0, 10 ng) is added to wells H9, H10, and H11 to serve as additional positive controls for the assay.

[1224] The 96 well dishes containing Jurkat cells treated with supernatants are placed in an incubator for 48 hrs (note: this time is variable between 48-72 hrs). 35 ul samples from each well are then transferred to an opaque 96 well plate using a 12 channel pipette. The opaque plates should be covered (using sellophene covers) and stored at −20 degree C. until SEAP assays are performed according to Example 36. The plates containing the remaining treated cells are placed at 4 degree C. and serve as a source of material for repeating the assay on a specific well if desired.

[1225] As a positive control, 100 Unit/ml interferon gamma can be used which is known to activate Jurkat T cells. Over 30 fold induction is typically observed in the positive control wells.

[1226] The above protocol may be used in the generation of both transient, as well as stable, transfected cells, which would be apparent to those of skill in the art.

### Example 33

### High-Throughput Screening Assay Identifying Myeloid Activity

[1227] The following protocol is used to assess myeloid activity of polypeptide of the present invention by determining whether polypeptide of the present invention proliferates and/or differentiates myeloid cells. Myeloid cell activity is assessed using the GAS/SEAP/Neo construct produced in Example 31. Thus, factors that increase SEAP activity indicate the ability to activate the Jaks-STATS signal transduction pathway. The myeloid cell used in this assay is U937, a pre-monocyte cell line, although TF-1, HL60, or KG1 can be used.

[1228] To transiently transfect U937 cells with the GAS/SEAP/Neo construct produced in Example 31, a DEAE-Dextran method (Kharbanda et. al., 1994, Cell Growth & Differentiation, 5:259-265) is used. First, harvest 2×10⁷ U937 cells and wash with PBS. The U937 cells are usually grown in RPMI 1640 medium containing 10% heat-inactivated fetal bovine serum (FBS) supplemented with 100 units/ml penicillin and 100 mg/ml streptomycin.

[1229] Next, suspend the cells in 1 ml of 20 mM Tris-HCl (pH 7.4) buffer containing 0.5 mg/ml DEAE-Dextran, 8 ug GAS-SEAP2 plasmid DNA, 140 mM NaCl, 5 mM KCl, 375 uM Na₂HPO₄.7H₂O, 1 mM MgCl₂, and 675 uM CaCl₂. Incubate at 37 degrees C. for 45 min.

[1230] Wash the cells with RPMI 1640 medium containing 10% FBS and then resuspend in 10 ml complete medium and incubate at 37 degree C. for 36 hr.

[1231] The GAS-SEAP/U937 stable cells are obtained by growing the cells in 400 ug/ml G418. The G418-free medium is used for routine growth but every one to two months, the cells should be re-grown in 400 ug/ml G418 for couple of passages.

[1232] These cells are tested by harvesting 1×10⁸ cells (this is enough for ten 96-well plates assay) and wash with PBS. Suspend the cells in 200 ml above described growth medium, with a final density of 5×10⁵ cells/ml. Plate 200 ul cells per well in the 96-well plate (or 1×10⁵ cells/well).

[1233] Add 50 ul of the supernatant prepared by the protocol described in Example 30. Incubate at 37 degee C for 48 to 72 hr. As a positive control, 100 Unit/ml interferon gamma can be used which is known to activate U937 cells. Over 30 fold induction is typically observed in the positive control wells. SEAP assay the supernatant according to the protocol described in Example 36.

### Example 34

### High-Throughput Screening Assay Identifying Neuronal Activity

[1234] When cells undergo differentiation and proliferation, a group of genes are activated through many different signal transduction pathways. One of these genes, EGR1 (early growth response gene 1), is induced in various tissues and cell types upon activation. The promoter of EGR1 is responsible for such induction. Using the EGR1 promoter linked to reporter molecules, activation of cells can be assessed by polypeptide of the present invention.

[1235] Particularly, the following protocol is used to assess neuronal activity in PC12 cell lines. PC12 cells (rat phenochromocytoma cells) are known to proliferate and/or differentiate by activation with a number of mitogens, such as TPA (tetradecanoyl phorbol acetate), NGF (nerve growth factor), and EGF (epidermal growth factor). The EGR1 gene expression is activated during this treatment. Thus, by stably transfecting PC12 cells with a construct containing an EGR promoter linked to SEAP reporter, activation of PC12 cells by polypeptide of the present invention can be assessed.

[1236] The EGR/SEAP reporter construct can be assembled by the following protocol. The EGR-1 promoter sequence (-633 to +1)(Sakamoto K et al., Oncogene 6:867-871 (1991)) can be PCR amplified from human genomic DNA using the following primers:

(SEQ ID NO: 6)

5′ GCGCTCGAGGGATGACAGCGATAGAACCCCGG-3′

(SEQ ID NO: 7)

5′ GCGAAGCTTCGCGACTCCCCGGATCCGCCTC-3′

[1237] Using the GAS:SEAP/Neo vector produced in Example 31, EGR1 amplified product can then be inserted into this vector. Linearize the GAS:SEAP/Neo vector using restriction enzymes XhoI/HindIII, removing the GAS/SV40 stuffer. Restrict the EGR1 amplified product with these same enzymes. Ligate the vector and the EGR1 promoter.

[1238] To prepare 96 well-plates for cell culture, two mls of a coating solution (1:30 dilution of collagen type I (Upstate Biotech Inc. Cat#08-115) in 30% ethanol (filter sterilized)) is added per one 10 cm plate or 50 ml per well of the 96-well plate, and allowed to air dry for 2 hr.

[1239] PC12 cells are routinely grown in RPMI-1640 medium (Bio Whittaker) containing 10% horse serum (JRH BIOSCIENCES, Cat. #12449-78P), 5% heat-inactivated fetal bovine serum (FBS) supplemented with 100 units/ml penicillin and 100 ug/ml streptomycin on a precoated 10 cm tissue culture dish. One to four split is done every three to four days. Cells are removed from the plates by scraping and resuspended with pipetting up and down for more than 15 times.

[1240] Transfect the EGR/SEAP/Neo construct into PC12 using the Lipofectamine protocol described in Example 30. EGR-SEAP/PC12 stable cells are obtained by growing the cells in 300 ug/ml G418. The G418-free medium is used for routine growth but every one to two months, the cells should be re-grown in 300 ug/ml G418 for couple of passages.

[1241] To assay for neuronal activity, a 10 cm plate with cells around 70 to 80% confluent is screened by removing the old medium. Wash the cells once with PBS (Phosphate buffered saline). Then starve the cells in low serum medium (RPMI-1640 containing 1% horse serum and 0.5% FBS with antibiotics) overnight.

[1242] The next morning, remove the medium and wash the cells with PBS. Scrape off the cells from the plate, suspend the cells well in 2 ml low serum medium. Count the cell number and add more low serum medium to reach final cell density as 5×10⁵ cells/ml.

[1243] Add 200 ul of the cell suspension to each well of 96-well plate (equivalent to 1×10⁵ cells/well). Add 50 ul supernatant produced by Example 30, 37 degree C. for 48 to 72 hr. As a positive control, a growth factor known to activate PCl₂ cells through EGR can be used, such as 50 ng/ul of Neuronal Growth Factor (NGF). Over fifty-fold induction of SEAP is typically seen in the positive control wells. SEAP assay the supernatant according to Example 36.

### Example 35

### High-Throughput Screening Assay for T-Cell Activity

[1244] NF-KB (Nuclear Factor KB) is a transcription factor activated by a wide variety of agents including the inflammatory cytokines IL-1 and TNF, CD30 and CD40, lymphotoxin-alpha and lymphotoxin-beta, by exposure to LPS or thrombin, and by expression of certain viral gene products. As a transcription factor, NF-KB regulates the expression of genes involved in immune cell activation, control of apoptosis (NF-KB appears to shield cells from apoptosis), B and T-cell development, anti-viral and antimicrobial responses, and multiple stress responses.

[1245] In non-stimulated conditions, NF-KB is retained in the cytoplasm with I-KB (Inhibitor KB). However, upon stimulation, I-KB is phosphorylated and degraded, causing NF-KB to shuttle to the nucleus, thereby activating transcription of target genes. Target genes activated by NF-KB include IL-2, IL-6, GM-CSF, ICAM-1 and class 1 MHC.

[1246] Due to its central role and ability to respond to a range of stimuli, reporter constructs utilizing the NF-KB promoter element are used to screen the supernatants produced in Example 30. Activators or inhibitors of NF-KB would be useful in treating, preventing, and/or diagnosing diseases. For example, inhibitors of NF-KB could be used to treat those diseases related to the acute or chronic activation of NF-KB, such as rheumatoid arthritis.

[1247] To construct a vector containing the NF-KB promoter element, a PCR based strategy is employed. The upstream primer contains four tandem copies of the NF-KB binding site (GGGGACTTTCCC) (SEQ ID NO: 8), 18 bp of sequence complementary to the 5′ end of the SV40 early promoter sequence, and is flanked with an XhoI site:

(SEQ ID NO: 9)

5′:GCGGCCTCGAGGGGACTTTCCCGGGGACTTTCCGGGGACTTTCCGGG
ACTTTCCATCCTGCCATCTCAATTAG:3′

[1248] The downstream primer is complementary to the 3′ end of the SV40 promoter and is flanked with a Hind III site: 5′:GCGGCAAGCTTTTTGCAAAGCCTAGGC:3′ (SEQ ID NO: 4)

[1249] PCR amplification is performed using the SV40 promoter template present in the pB-gal:promoter plasmid obtained from Clontech. The resulting PCR fragment is digested with XhoI and Hind III and subcloned into BLSK2-. (Stratagene) Sequencing with the T7 and T3 primers confirms the insert contains the following sequence:

(SEQ ID NO: 10)

5′:CTCGAGGGGACTTTCCCGGGGACTTTCCGGGGACTTTCCGGGACTTT
CCATCTGCCATCTCAATTAGTCAGCAACCATAGTCCCGCCCCTAACTCCG
CCCATCCCGCCCCTAACTCCGCCCAGTTCCGCCCATTCTCCGCCCCATGG
CTGACTAATTTTTTTTATTTATGCAGAGGCCGAGGCCGCCTCGGCCTCTG
AGCTATTCCAGAAGTAGTGAGGAGGCTTTTTTGGAGGCCTAGGCTTTTGC
AAAAAGCTT:3′

[1250] Next, replace the SV40 minimal promoter element present in the pSEAP2-promoter plasmid (Clontech) with this NF-KB/SV40 fragment using XhoI and HindIII. However, this vector does not contain a neomycin resistance gene, and therefore, is not preferred for mammalian expression systems.

[1251] In order to generate stable mammalian cell lines, the NF-KB/SV40/SEAP cassette is removed from the above NF-KB/SEAP vector using restriction enzymes SalI and NotI, and inserted into a vector containing neomycin resistance. Particularly, the NF-KB/SV40/SEAP cassette was inserted into pGFP-1 (Clontech), replacing the GFP gene, after restricting pGFP-1 with SalI and NotI.

[1252] Once NF-KB/SV40/SEAP/Neo vector is created, stable Jurkat T-cells are created and maintained according to the protocol described in Example 32. Similarly, the method for assaying supernatants with these stable Jurkat T-cells is also described in Example 32. As a positive control, exogenous TNF alpha (0.1, 1, 10 ng) is added to wells H₉, H₁₀, and H11, with a 5-10 fold activation typically observed.

### Example 36

### Assay for SEAP Activity

[1253] As a reporter molecule for the assays described in Examples 32-35, SEAP activity is assayed using the Tropix Phospho-light Kit (Cat. BP-400) according to the following general procedure. The Tropix Phospho-light Kit supplies the Dilution, Assay, and Reaction Buffers used below.

[1254] Prime a dispenser with the 2.5× Dilution Buffer and dispense 15 ul of 2.5× dilution buffer into Optiplates containing 35 ul of a supernatant. Seal the plates with a plastic sealer and incubate at 65 degree C. for 30 min. Separate the Optiplates to avoid uneven heating.

[1255] Cool the samples to room temperature for 15 minutes. Empty the dispenser and prime with the Assay Buffer. Add 50 ml Assay Buffer and incubate at room temperature 5 min. Empty the dispenser and prime with the Reaction Buffer (see the Table below). Add 50 ul Reaction Buffer and incubate at room temperature for 20 minutes. Since the intensity of the chemiluminescent signal is time dependent, and it takes about 10 minutes to read 5 plates on a luminometer, thus one should treat 5 plates at each time and start the second set 10 minutes later.

[1256] Read the relative light unit in the luminometer. Set H12 as blank, and print the results. An increase in chemiluminescence indicates reporter activity.

Reaction Buffer Formulation:

| # of plates | Rxn buffer diluent (ml) | CSPD (ml) |
|---|---|---|
| 10 | 60 | 3 |
| 11 | 65 | 3.25 |
| 12 | 70 | 3.5 |
| 13 | 75 | 3.75 |
| 14 | 80 | 4 |
| 15 | 85 | 4.25 |
| 16 | 90 | 4.5 |
| 17 | 95 | 4.75 |
| 18 | 100 | 5 |
| 19 | 105 | 5.25 |
| 20 | 110 | 5.5 |
| 21 | 115 | 5.75 |
| 22 | 120 | 6 |
| 23 | 125 | 6.25 |
| 24 | 130 | 6.5 |
| 25 | 135 | 6.75 |
| 26 | 140 | 7 |
| 27 | 145 | 7.25 |
| 28 | 150 | 7.5 |
| 29 | 155 | 7.75 |
| 30 | 160 | 8 |
| 31 | 165 | 8.25 |
| 32 | 170 | 8.5 |
| 33 | 175 | 8.75 |
| 34 | 180 | 9 |
| 35 | 185 | 9.25 |
| 36 | 190 | 9.5 |
| 37 | 195 | 9.75 |
| 38 | 200 | 10 |
| 39 | 205 | 10.25 |
| 40 | 210 | 10.5 |
| 41 | 215 | 10.75 |
| 42 | 220 | 11 |
| 43 | 225 | 11.25 |
| 44 | 230 | 11.5 |
| 45 | 235 | 11.75 |
| 46 | 240 | 12 |
| 47 | 245 | 12.25 |
| 48 | 250 | 12.5 |
| 49 | 255 | 12.75 |
| 50 | 260 | 13 |

### Example 37

### High-Throughput Screening Assay Identifying Changes in Small Molecule Concentration and Membrane Permeability

[1257] Binding of a ligand to a receptor is known to alter intracellular levels of small molecules, such as calcium, potassium, sodium, and pH, as well as alter membrane potential. These alterations can be measured in an assay to identify supernatants which bind to receptors of a particular cell. Although the following protocol describes an assay for calcium, this protocol can easily be modified to detect changes in potassium, sodium, pH, membrane potential, or any other small molecule which is detectable by a fluorescent probe.

[1258] The following assay uses Fluorometric Imaging Plate Reader (“FLIPR”) to measure changes in fluorescent molecules (Molecular Probes) that bind small molecules. Clearly, any fluorescent molecule detecting a small molecule can be used instead of the calcium fluorescent molecule, fluo-4 (Molecular Probes, Inc.; catalog no. F-14202), used here.

[1259] For adherent cells, seed the cells at 10,000-20,000 cells/well in a Co-star black 96-well plate with clear bottom. The plate is incubated in a CO₂ incubator for 20 hours. The adherent cells are washed two times in Biotek washer with 200 ul of HBSS (Hank's Balanced Salt Solution) leaving 100 ul of buffer after the final wash.

[1260] A stock solution of 1 mg/ml fluo-4 is made in 10% pluronic acid DMSO. To load the cells with fluo-4, 50 ul of 12 ug/ml fluo-4 is added to each well. The plate is incubated at 37 degrees C. in a CO₂ incubator for 60 min. The plate is washed four times in the Biotek washer with HBSS leaving 100 ul of buffer.

[1261] For non-adherent cells, the cells are spun down from culture media. Cells are re-suspended to 2-5×10⁶ cells/ml with HBSS in a 50-ml conical tube. 4 ul of 1 mg/ml fluo-4 solution in 10% pluronic acid DMSO is added to each ml of cell suspension. The tube is then placed in a 37 degrees C. water bath for 30-60 min. The cells are washed twice with HBSS, resuspended to 1×10⁶ cells/ml, and dispensed into a microplate, 100 ul/well. The plate is centrifuged at 1000 rpm for 5 min. The plate is then washed once in Denley Cell Wash with 200 ul, followed by an aspiration step to 100 ul final volume.

[1262] For a non-cell based assay, each well contains a fluorescent molecule, such as fluo-4. The supernatant is added to the well, and a change in fluorescence is detected.

[1263] To measure the fluorescence of intracellular calcium, the FLIPR is set for the following parameters: (1) System gain is 300-800 mW; (2) Exposure time is 0.4 second; (3) Camera F/stop is F/2; (4) Excitation is 488 nm; (5) Emission is 530 nm; and (6) Sample addition is 50 ul. Increased emission at 530 nm indicates an extracellular signaling event caused by the a molecule, either polypeptide of the present invention or a molecule induced by polypeptide of the present invention, which has resulted in an increase in the intracellular Ca⁺⁺ concentration.

### Example 38

### High-Throughput Screening Assay Identifying Tyrosine Kinase Activity

[1264] The Protein Tyrosine Kinases (PTK) represent a diverse group of transmembrane and cytoplasmic kinases. Within the Receptor Protein Tyrosine Kinase RPTK) group are receptors for a range of mitogenic and metabolic growth factors including the PDGF, FGF, EGF, NGF, HGF and Insulin receptor subfamilies. In addition there are a large family of RPTKs for which the corresponding ligand is unknown. Ligands for RPTKs include mainly secreted small proteins, but also membrane-bound and extracellular matrix proteins.

[1265] Activation of RPTK by ligands involves ligand-mediated receptor dimerization, resulting in transphosphorylation of the receptor subunits and activation of the cytoplasmic tyrosine kinases. The cytoplasmic tyrosine kinases include receptor associated tyrosine kinases of the src-family (e.g., src, yes, Ick, lyn, fyn) and non-receptor linked and cytosolic protein tyrosine kinases, such as the Jak family, members of which mediate signal transduction triggered by the cytokine superfamily of receptors (e.g., the Interleukins, Interferons, GM-CSF, and Leptin).

[1266] Because of the wide range of known factors capable of stimulating tyrosine kinase activity, identifying whether polypeptide of the present invention or a molecule induced by polypeptide of the present invention is capable of activating tyrosine kinase signal transduction pathways is of interest. Therefore, the following protocol is designed to identify such molecules capable of activating the tyrosine kinase signal transduction pathways.

[1267] Seed target cells (e.g., primary keratinocytes) at a density of approximately 25,000 cells per well in a 96 well Loprodyne Silent Screen Plates purchased from Nalge Nunc (Naperville, Ill.). The plates are sterilized with two 30 minute rinses with 100% ethanol, rinsed with water and dried overnight. Some plates are coated for 2 hr with 100 ml of cell culture grade type I collagen (50 mg/ml), gelatin (2%) or polylysine (50 mg/ml), all of which can be purchased from Sigma Chemicals (St. Louis, Mo.) or 10% Matrigel purchased from Becton Dickinson (Bedford,MA), or calf serum, rinsed with PBS and stored at 4 degree C. Cell growth on these plates is assayed by seeding 5,000 cells/well in growth medium and indirect quantitation of cell number through use of alamarBlue as described by the manufacturer Alamar Biosciences, Inc. (Sacramento, Calif.) after 48 hr. Falcon plate covers #3071 from Becton Dickinson (Bedford, Mass.) are used to cover the Loprodyne Silent Screen Plates. Falcon Microtest III cell culture plates can also be used in some proliferation experiments.

[1268] To prepare extracts, A431 cells are seeded onto the nylon membranes of Loprodyne plates (20,000/200 ml/well) and cultured overnight in complete medium. Cells are quiesced by incubation in serum-free basal medium for 24 hr. After 5-20 minutes treatment with EGF (60 ng/ml) or 50 ul of the supernatant produced in Example 30, the medium was removed and 100 ml of extraction buffer ((20 mM HEPES pH 7.5, 0.15 M NaCl, 1% Triton X-100, 0.1% SDS, 2 mM Na3VO4, 2 mM Na4P2O7 and a cocktail of protease inhibitors (# 1836170) obtained from Boeheringer Mannheim (Indianapolis, Ind.)) is added to each well and the plate is shaken on a rotating shaker for 5 minutes at 4° C. The plate is then placed in a vacuum transfer manifold and the extract filtered through the 0.45 mm membrane bottoms of each well using house vacuum. Extracts are collected in a 96-well catch/assay plate in the bottom of the vacuum manifold and immediately placed on ice. To obtain extracts clarified by centrifugation, the content of each well, after detergent solubilization for 5 minutes, is removed and centrifuged for 15 minutes at 4 degree C. at 16,000×g.

[1269] Test the filtered extracts for levels of tyrosine kinase activity. Although many methods of detecting tyrosine kinase activity are known, one method is described here.

[1270] Generally, the tyrosine kinase activity of a supernatant is evaluated by determining its ability to phosphorylate a tyrosine residue on a specific substrate (a biotinylated peptide). Biotinylated peptides that can be used for this purpose include PSK1 (corresponding to amino acids 6-20 of the cell division kinase cdc2-p34) and PSK2 (corresponding to amino acids 1-17 of gastrin). Both peptides are substrates for a range of tyrosine kinases and are available from Boehringer Mannheim.

[1271] The tyrosine kinase reaction is set up by adding the following components in order. First, add 10 ul of 5 uM Biotinylated Peptide, then 10 ul ATP/Mg₂+(SM ATP/50 mM MgCl₂), then 10 ul of 5×Assay Buffer (40 mM imidazole hydrochloride, pH 7.3, 40 mM beta-glycerophosphate, 1 mM EGTA, 100 mM MgCl₂, 5 mM MnCl₂, 0.5 mg/ml BSA), then Sul of Sodium Vanadate (1 mM), and then Sul of water. Mix the components gently and preincubate the reaction mix at 30 degree C. for 2 min. Initial the reaction by adding 10 ul of the control enzyme or the filtered supernatant.

[1272] The tyrosine kinase assay reaction is then terminated by adding 10 ul of 120 mm EDTA and place the reactions on ice.

[1273] Tyrosine kinase activity is determined by transferring 50 ul aliquot of reaction mixture to a microtiter plate (MTP) module and incubating at 37 degree C. for 20 min. This allows the streptavidin coated 96 well plate to associate with the biotinylated peptide. Wash the MTP module with 300 ul/well of PBS four times. Next add 75 ul of anti-phospolyrosine antibody conjugated to horse radish peroxidase (anti-P-Tyr-POD(0.5u/ml)) to each well and incubate at 37 degree C. for one hour. Wash the well as above.

[1274] Next add 100 ul of peroxidase substrate solution (Boehringer Mannheim) and incubate at room temperature for at least 5 mins (up to 30 min). Measure the absorbance of the sample at 405 nm by using ELISA reader. The level of bound peroxidase activity is quantitated using an ELISA reader and reflects the level of tyrosine kinase activity.

### Example 39

### High-Throughput Screening Assay Identifying Phosphorylation Activity

[1275] As a potential alternative and/or complement to the assay of protein tyrosine kinase activity described in Example 38, an assay which detects activation (phosphorylation) of major intracellular signal transduction intermediates can also be used. For example, as described below one particular assay can detect tyrosine phosphorylation of the Erk-1 and Erk-2 kinases. However, phosphorylation of other molecules, such as Raf, JNK, p38 MAP, Map kinase kinase (MEK), MEK kinase, Src, Muscle specific kinase (MuSK), IRAK, Tec, and Janus, as well as any other phosphoserine, phosphotyrosine, or phosphothreonine molecule, can be detected by substituting these molecules for Erk-1 or Erk-2 in the following assay.

[1276] Specifically, assay plates are made by coating the wells of a 96-well ELISA plate with 0.1 ml of protein G (lug/ml) for 2 hr at room temp, (RT). The plates are then rinsed with PBS and blocked with 3% BSAIPBS for 1 hr at RT. The protein G plates are then treated with 2 commercial monoclonal antibodies (100 ng/well) against Erk-1 and Erk-2 (1 hr at RT) (Santa Cruz Biotechnology). (To detect other molecules, this step can easily be modified by substituting a monoclonal antibody detecting any of the above described molecules.) After 3-5 rinses with PBS, the plates are stored at 4 degree C. until use.

[1277] A431 cells are seeded at 20,000/well in a 96-well Loprodyne filterplate and cultured overnight in growth medium. The cells are then starved for 48 hr in basal medium (DMEM) and then treated with EGF (6 ng/well) or 50 ul of the supernatants obtained in Example 30 for 5-20 minutes. The cells are then solubilized and extracts filtered directly into the assay plate.

[1278] After incubation with the extract for 1 hr at RT, the wells are again rinsed. As a positive control, a commercial preparation of MAP kinase (10 ng/well) is used in place of A431 extract. Plates are then treated with a commercial polyclonal (rabbit) antibody (1 ug/ml) which specifically recognizes the phosphorylated epitope of the Erk-1 and Erk-2 kinases (1 hr at RT). This antibody is biotinylated by standard procedures. The bound polyclonal antibody is then quantitated by successive incubations with Europium-streptavidin and Europium fluorescence enhancing reagent in the Wallac DELFIA instrument (time-resolved fluorescence). An increased fluorescent signal over background indicates a phosphorylation by polypeptide of the present invention or a molecule induced by polypeptide of the present invention.

### Example 40

### Assay for the Stimulation of Bone Marrow CD34+Cell Proliferation

[1279] This assay is based on the ability of human CD34+to proliferate in the presence of hematopoietic growth factors and evaluates the ability of isolated polypeptides expressed in mammalian cells to stimulate proliferation of CD34+ cells.

[1280] It has been previously shown that most mature precursors will respond to only a single signal. More immature precursors require at least two signals to respond. Therefore, to test the effect of polypeptides on hematopoietic activity of a wide range of progenitor cells, the assay contains a given polypeptide in the presence or absence of other hematopoietic growth factors. Isolated cells are cultured for 5 days in the presence of Stem Cell Factor (SCF) in combination with tested sample. SCF alone has a very limited effect on the proliferation of bone marrow (BM) cells, acting in such conditions only as a “survival” factor. However, combined with any factor exhibiting stimulatory effect on these cells (e.g., IL-3), SCF will cause a synergistic effect. Therefore, if the tested polypeptide has a stimulatory effect on hematopoietic progenitors, such activity can be easily detected. Since normal BM cells have a low level of cycling cells, it is likely that any inhibitory effect of a given polypeptide, or agonists or antagonists thereof, might not be detected. Accordingly, assays for an inhibitory effect on progenitors is preferably tested in cells that are first subjected to in vitro stimulation with SCF+IL+3, and then contacted with the compound that is being evaluated for inhibition of such induced proliferation.

[1281] Briefly, CD34+ cells are isolated using methods known in the art. The cells are thawed and resuspended in medium (QBSF 60 serum-free medium with 1% L-glutamine (SOOml) Quality Biological, Inc., Gaithersburg, Md. Cat# 160-204-101). After several gentle centrifugation steps at 200×g, cells are allowed to rest for one hour. The cell count is adjusted to 2.5×10⁵ cells/ml. During this time, 100 μl of sterile water is added to the peripheral wells of a 96-well plate. The cytokines that can be tested with a given polypeptide in this assay is rhSCF (R&D Systems, Minneapolis, Minn., Cat#255-SC) at 50 ng/ml alone and in combination with rhSCF and rhIL-3 (R&D Systems, Minneapolis, Minn., Cat#203-ML) at 30 ng/ml. After one hour, 10 μl of prepared cytokines, 50 μl of the supernatants prepared in Example 30 (supernatants at 1:2 dilution=50 μl) and 20 μl of diluted cells are added to the media which is already present in the wells to allow for a final total volume of 100 μl. The plates are then placed in a 37° C./5% CO₂ incubator for five days.

[1282] Eighteen hours before the assay is harvested, 0.5 μCi/well of [3H] Thymidine is added in a 10 μl volume to each well to determine the proliferation rate. The experiment is terminated by harvesting the cells from each 96-well plate to a filtermat using the Tomtec Harvester 96. After harvesting, the filtermats are dried, trimmed and placed into OmniFilter assemblies consisting of one OmniFilter plate and one OmniFilter Tray. 60 μl Microscint is added to each well and the plate sealed with TopSeal-A press-on sealing film A bar code 15 sticker is affixed to the first plate for counting. The sealed plates are then loaded and the level of radioactivity determined via the Packard Top Count and the printed data collected for analysis. The level of radioactivity reflects the amount of cell proliferation.

[1283] The studies described in this example test the activity of a given polypeptide to stimulate bone marrow CD34+ cell proliferation. One skilled in the art could easily modify the exemplified studies to test the activity of polynucleotides (e.g., gene therapy), antibodies, agonists, and/or antagonists and fragments and variants thereof. As a nonlimiting example, potential antagonists tested in this assay would be expected to inhibit cell proliferation in the presence of cytokines and/or to increase the inhibition of cell proliferation in the presence of cytokines- and a given polypeptide. In contrast, potential agonists tested in this assay would be expected to enhance cell proliferation and/or to decrease the inhibition of cell proliferation in the presence of cytokines and a given polypeptide.

[1284] The ability of a gene to stimulate the proliferation of bone marrow CD34+ cells indicates that polynucleotides and polypeptides corresponding to the gene are useful for the diagnosis and treatment of disorders affecting the immune system and hematopoiesis. Representative uses are described in the “Immune Activity” and “Infectious Disease” sections above, and elsewhere herein.

### Example 41

### Assay for Extracellular Matrix Enhanced Cell Response (EMECR)

[1285] The objective of the Extracellular Matrix Enhanced Cell Response (EMECR) assay is to identify gene products (e.g., isolated polypeptides) that act on the hematopoietic stem cells in the context of the extracellular matrix (ECM) induced signal.

[1286] Cells respond to the regulatory factors in the context of signal(s) received from the surrounding microenvironment. For example, fibroblasts, and endothelial and epithelial stem cells fail to replicate in the absence of signals from the ECM. Hematopoietic stem cells can undergo self-renewal in the bone marrow, but not in in vitro suspension culture. The ability of stem cells to undergo self-renewal in vitro is dependent upon their interaction with the stromal cells and the ECM protein fibronectin (fn). Adhesion of cells to fn is mediated by the α₅.β₁ and α₄.β₁ integrin receptors, which are expressed by human and mouse hematopoietic stem cells. The factor(s) which integrate with the ECM environment and are responsible for stimulating stem cell self-renewal have not yet been identified. Discovery of such factors should be of great interest in gene therapy and bone marrow transplant applications

[1287] Briefly, polystyrene, non tissue culture treated, 96-well plates are coated with fn fragment at a coating concentration of 0.2 μg/cm². Mouse bone marrow cells are plated (1,000 cells/well) in 0.2 ml of serum-free medium. Cells cultured in the presence of IL-3 (5 ng/ml)+SCF (50 ng/ml) would serve as the positive control, conditions under which little self-renewal but pronounced differentiation of the stem cells is to be expected. Gene products of the invention (e.g., including, but not limited to, polynucleotides and polypeptides of the present invention, and supernatants produced in Example 30), are tested with appropriate negative controls in the presence and absence of SCF(5.0 ng/ml), where test factor supernatants represent 10% of the total assay volume. The plated cells are then allowed to grow by incubating in a low oxygen environment (5% CO₂, 7% O₂, and 88% N₂) tissue culture incubator for 7 days. The number of proliferating cells within the wells is then quantitated by measuring thymidine incorporation into cellular DNA. Verification of the positive hits in the assay will require phenotypic characterization of the cells, which can be accomplished by scaling up of the culture system and using appropriate antibody reagents against cell surface antigens and FACScan.

[1288] One skilled in the art could easily modify the exemplified studies to test the activity of polynucleotides (e.g., gene therapy), antibodies, agonists, and/or antagonists and fragments and variants thereof.

[1289] If a particular polypeptide of the present invention is found to be a stimulator of hematopoietic progenitors, polynucleotides and polypeptides corresponding to the gene encoding said polypeptide may be useful for the diagnosis and treatment of disorders affecting the immune system and hematopoiesis. Representative uses are described in the “Immune Activity” and “Infectious Disease” sections above, and elsewhere herein. The gene product may also be useful in the expansion of stem cells and committed progenitors of various blood lineages, and in the differentiation and/or proliferation of various cell types.

[1290] Additionally, the polynucleotides and/or polypeptides of the gene of interest and/or agonists and/or antagonists thereof, may also be employed to inhibit the proliferation and differentiation of hematopoietic cells and therefore may be employed to protect bone marrow stem cells from chemotherapeutic agents during chemotherapy. This antiproliferative effect may allow administration of higher doses of chemotherapeutic agents and, therefore, more effective chemotherapeutic treatment.

[1291] Moreover, polynucleotides and polypeptides corresponding to the gene of interest may also be useful for the treatment and diagnosis of hematopoietic related disorders such as, for example, anemia, pancytopenia, leukopenia, thrombocytopenia or leukemia since stromal cells are important in the production of cells of hematopoietic lineages. The uses include bone marrow cell ex-vivo culture, bone marrow transplantation, bone marrow reconstitution, radiotherapy or chemotherapy of neoplasia.

### Example 42

### Human Dermal Fibroblast and Aortic Smooth Muscle Cell Proliferation

[1292] The polypeptide of interest is added to cultures of normal human dermal fibroblasts (NHDF) and human aortic smooth muscle cells (AoSMC) and two co-assays are performed with each sample. The first assay examines the effect of the polypeptide of interest on the proliferation of normal human dermal fibroblasts (NHDF) or aortic smooth muscle cells (AoSMC). Aberrant growth of fibroblasts or smooth muscle cells is a part of several pathological processes, including fibrosis, and restenosis. The second assay examines IL6 production by both NHDF and SMC. IL6 production is an indication of functional activation. Activated cells will have increased production of a number of cytokines and other factors, which can result in a proinflammatory or immunomodulatory outcome. Assays are run with and without co-TNFa stimulation, in order to check for costimulatory or inhibitory activity.

[1293] Briefly, on day 1, 96-well black plates are set up with 1000 cells/well NHDF) or 2000 cells/well (AoSMC) in 100 μl culture media. NHDF culture media contains: Clonetics FB basal media, 1 mg/ml hFGF, 5 mg/ml insulin, 50 mg/ml gentamycin, 2%FBS, while AoSMC culture media contains Clonetics SM basal media, 0.5 μg/ml hEGF, 5 mg/ml insulin, ltg/ml hFGF, 50 mg/ml gentamycin, 50 ug/ml Amphotericin B, 5%FBS. After incubation at 37° C. for at least 4-5 hours culture media is aspirated and replaced with growth arrest media. Growth arrest media for NHDF contains fibroblast basal media, 50 mg/ml gentamycin, 2% FBS, while growth arrest media for AoSMC contains SM basal media, 50 mg/ml gentamycin, 50 μg/ml Amphotericin B, 0.4% FBS. Incubate at 37° C. until day 2.

[1294] On day 2, serial dilutions and templates of the polypeptide of interest are designed such that they always include media controls and known-protein controls. For both stimulation and inhibition experiments, proteins are diluted in growth arrest media. For inhibition experiments, TNFa is added to a final concentration of 2 ng/ml (NHDF) or 5 ng/ml (AoSMC). Add ⅓ vol media containing controls or polypeptides of the present invention and incubate at 37 degrees C./5% CO₂ until day 5.

[1295] Transfer 60 μl from each well to another labeled 96-well plate, cover with a plate-sealer, and store at 4 degrees C. until Day 6 (for IL6 ELISA). To the remaining 100 μl in the cell culture plate, aseptically add Alamar Blue in an amount equal to 10% of the culture volume (10 μl). Return plates to incubator for 3 to 4 hours. Then measure fluorescence with excitation at 530 nm and emission at 590 nm using the CytoFluor. This yields the growth stimulation/inhibition data.

[1296] On day 5, the IL6 ELISA is performed by coating a 96 well plate with 50-100 ul/well of Anti-Human IL6 Monoclonal antibody diluted in PBS, pH 7.4, incubate ON at room temperature.

[1297] On day 6, empty the plates into the sink and blot on paper towels. Prepare Assay Buffer containing PBS with 4% BSA. Block the plates with 200 μl/well of Pierce Super Block blocking buffer in PBS for 1-2 hr and then wash plates with wash buffer (PBS, 0.05% Tween-20). Blot plates on paper towels. Then add 50 μl/well of diluted Anti-Human IL-6 Monoclonal, Biotin-labeled antibody at 0.50 mg/ml. Make dilutions of IL-6 stock in media (30, 10, 3, 1, 0.3, 0 ng/ml). Add duplicate samples to top row of plate. Cover the plates and incubate for 2 hours at RT on shaker.

[1298] Plates are washed with wash buffer and blotted on paper towels. Dilute EU-labeled Streptavidin 1:1000 in Assay buffer, and add 100 μl/well. Cover the plate and incubate 1 h at RT. Plates are again washed with wash buffer and blotted on paper towels.

[1299] Add 100 μl/well of Enhancement Solution. Shake for 5 minutes. Read the plate on the Wallac DELFIA Fluorometer. Readings from triplicate samples in each assay were tabulated and averaged.

[1300] A positive result in this assay suggests AoSMC cell proliferation and that the polypeptide of the present invention may be involved in dermal fibroblast proliferation and/or smooth muscle cell proliferation. A positive result also suggests many potential uses of polypeptides, polynucleotides, agonists and/or antagonists of the polynucleotide/polypeptide of the present invention which gives a positive result. For example, inflammation and immune responses, wound healing, and angiogenesis, as detailed throughout this specification. Particularly, polypeptides of the present invention and polynucleotides of the present invention may be used in wound healing and dermal regeneration, as well as the promotion of vasculogenesis, both of the blood vessels and lymphatics. The growth of vessels can be used in the treatment of, for example, cardiovascular diseases. Additionally, antagonists of polypeptides and polynucleotides of the invention may be useful in treating diseases, disorders, and/or conditions which involve angiogenesis by acting as an anti-vascular agent (e.g., anti-angiogenesis). These diseases, disorders, and/or conditions are known in the art and/or are described herein, such as, for example, malignancies, solid tumors, benign tumors, for example hemangiomas, acoustic neuromas, neurofibromas, trachomas, and pyogenic granulomas; artheroscleric plaques; ocular angiogenic diseases, for example, diabetic retinopathy, retinopathy of prematurity, macular degeneration, corneal graft rejection, neovascular glaucoma, retrolental fibroplasia, rubeosis, retinoblastoma, uvietis and Pterygia (abnormal blood vessel growth) of the eye; rheumatoid arthritis; psoriasis; delayed wound healing; endometriosis; vasculogenesis; granulations; hypertrophic scars (keloids); nonunion fractures; scleroderma; trachoma; vascular adhesions; myocardial angiogenesis; coronary collaterals; cerebral collaterals; arterioyenous malformations; ischemic limb angiogenesis; Osler-Webber Syndrome; plaque neovascularization; telangiectasia; hemophiliac joints; angiofibroma; fibromuscular dysplasia; wound granulation; Crohn's disease; and atherosclerosis. Moreover, antagonists of polypeptides and polynucleotides of the invention may be useful in treating anti-hyperproliferative diseases and/or anti-inflammatory known in the art and/or described herein.

[1301] One skilled in the art could easily modify the exemplified studies to test the activity of polynucleotides (e.g., gene therapy), antibodies, agonists, and/or antagonists and fragments and variants thereof.

### Example 43

### Cellular Adhesion Molecule (CAM) Expression on Endothelial Cells

[1302] The recruitment of lymphocytes to areas of inflammation and angiogenesis involves specific receptor-ligand interactions between cell surface adhesion molecules (CAMs) on lymphocytes and the vascular endothelium. The adhesion process, in both normal and pathological settings, follows a multi-step cascade that involves intercellular adhesion molecule-1 (ICAM-1), vascular cell adhesion molecule-1 (VCAM-1), and endothelial leukocyte adhesion molecule-1 (E-selectin) expression on endothelial cells (EC). The expression of these molecules and others on the vascular endothelium determines the efficiency with which leukocytes may adhere to the local vasculature and extravasate into the local tissue during the development of an inflammatory response. The local concentration of cytokines and growth factor participate in the modulation of the expression of these CAMs.

[1303] Briefly, endothelial cells (e.g., Human Umbilical Vein Endothelial cells (HUVECs)) are grown in a standard 96 well plate to confluence, growth medium is removed from the cells and replaced with 100 μl of 199 Medium (10% fetal bovine serum (FBS)). Samples for testing and positive or negative controls are added to the plate in triplicate (in 10 μl volumes). Plates are then incubated at 37° C. for either 5 h (selectin and integrin expression) or 24 h (integrin expression only). Plates are aspirated to remove medium and 100 μl of 0.1% paraformaldehyde-PBS(with Ca++ and Mg++) is added to each well. Plates are held at 4° C. for 30 min. Fixative is removed from the wells and wells are washed 1× with PBS(+Ca,Mg)+0.5% BSA and drained. 10 μl of diluted primary antibody is added to the test and control wells. Anti-ICAM-1-Biotin, Anti-VCAM-1-Biotin and Anti-E-selectin-Biotin are used at a concentration of 10 μg/ml (1:10 dilution of 0.1 mg/ml stock antibody). Cells are incubated at 37° C. for 30 min. in a humidified environment. Wells are washed three times with PBS(+Ca,Mg)+0.5% BSA. 20 μl of diluted ExtrAvidin-Alkaline Phosphatase (1:5,000 dilution, referred to herein as the working dilution) are added to each well and incubated at 37° C. for 30 min. Wells are washed three times with PBS(+Ca,Mg)+0.5% BSA. Dissolve 1 tablet of p-Nitrophenol Phosphate pNPP per 5 ml of glycine buffer (pH 10.4). 100 μl of pNPP substrate in glycine buffer is added to each test well. Standard wells in triplicate are prepared from the working dilution of the ExtrAvidin-Alkaline Phosphotase in glycine buffer: 1:5,000 (10⁰)>10^{-0.5}>10⁻¹>10^{-1.5. 5} μl of each dilution is added to triplicate wells and the resulting AP content in each well is 5.50 ng, 1.74 ng, 0.55 ng, 0.18 ng. 100 μl of pNNP reagent is then added to each of the standard wells. The plate is incubated at 37° C. for 4 h. A volume of 50 μl of 3M NaOH is added to all wells. The plate is read on a plate reader at 405 nm using the background subtraction option on blank wells filled with glycine buffer only. Additionally, the template is set up to indicate the concentration of AP-conjugate in each standard well [5.50 ng; 1.74 ng; 0.55 ng; 0.18 ng]. Results are indicated as amount of bound AP-conjugate in each sample.

### Example 44

### Alamar Blue Endothelial Cells Proliferation Assay

[1304] This assay may be used to quantitatively determine protein mediated inhibition of bFGF-induced proliferation of Bovine Lymphatic Endothelial Cells (LECs), Bovine Aortic Endothelial Cells (BAECs) or Human Microvascular Uterine Myometrial Cells (UTMECs). This assay incorporates a fluorometric growth indicator based on detection of metabolic activity. A standard Alamar Blue Proliferation Assay is prepared in EGM-2MV with 10 ng/ml of bFGF added as a source of endothelial cell stimulation. This assay may be used with a variety of endothelial cells with slight changes in growth medium and cell concentration. Dilutions of the protein batches to be tested are diluted as appropriate. Serum-free medium (GIBCO SFM) without bFGF is used as a non-stimulated control and Angiostatin or TSP-1 are included as a known inhibitory controls.

[1305] Briefly, LEC, BAECs or UTMECs are seeded in growth media at a density of 5000 to 2000 cells/well in a 96 well plate and placed at 37degrees C. overnight. After the overnight incubation of the cells, the growth media is removed and replaced with GIBCO EC-SFM. The cells are treated with the appropriate dilutions of the protein of interest or control protein sample(s) (prepared in SFM) in triplicate wells with additional bFGF to a concentration of 10 ng/ml. Once the cells have been treated with the samples, the plate(s) is/are placed back in the 37° C. incubator for three days. After three days 10 ml of stock alamar blue (Biosource Cat#DAL1100) is added to each well and the plate(s) is/are placed back in the 37° C. incubator for four hours. The plate(s) are then read at 530 nm excitation and 590 nm emission using the CytoFluor fluorescence reader. Direct output is recorded in relative fluorescence units.

[1306] Alamar blue is an oxidation-reduction indicator that both fluoresces and changes color in response to chemical reduction of growth medium resulting from cell growth. As cells grow in culture, innate metabolic activity results in a chemical reduction of the immediate surrounding environment. Reduction related to growth causes the indicator to change from oxidized (non-fluorescent blue) form to reduced (fluorescent red) form (i.e., stimulated proliferation will produce a stronger signal and inhibited proliferation will produce a weaker signal and the total signal is proportional to the total number of cells as well as their metabolic activity). The background level of activity is observed with the starvation medium alone. This is compared to the output observed from the positive control samples (bFGF in growth medium) and protein dilutions.

### Example 45

### Detection of Inhibition of a Mixed Lymphocyte Reaction

[1307] This assay can be used to detect and evaluate inhibition of a Mixed Lymphocyte Reaction (MLR) by gene products (e.g., isolated polypeptides). Inhibition of a MLR may be due to a direct effect on cell proliferation and viability, modulation of costimulatory molecules on interacting cells, modulation of adhesiveness between lymphocytes and accessory cells, or modulation of cytokine production by accessory cells. Multiple cells may be targeted by these polypeptides since the peripheral blood mononuclear fraction used in this assay includes T, B and natural killer lymphocytes, as well as monocytes and dendritic cells.

[1308] Polypeptides of interest found to inhibit the MLR may find application in diseases associated with lymphocyte and monocyte activation or proliferation. These include, but are not limited to, diseases such as asthma, arthritis, diabetes, inflammatory skin conditions, psoriasis, eczema, systemic lupus erythematosus, multiple sclerosis, glomerulonephritis, inflammatory bowel disease, crohn's disease, ulcerative colitis, arteriosclerosis, cirrhosis, graft vs. host disease, host vs. graft disease, hepatitis, leukemia and lymphoma.

[1309] Briefly, PBMCs from human donors are purified by density gradient centrifugation using Lymphocyte Separation Medium (LSM®, density 1.0770 g/ml, Organon Teknika Corporation, West Chester, Pa.). PBMCs from two donors are adjusted to 2×10⁶ cells/ml in RPMI-1640 (Life Technologies, Grand Island, N.Y.) supplemented with 10% FCS and 2 mM glutamine. PBMCs from a third donor is adjusted to 2×10⁵ cells/ml. Fifty microliters of PBMCs from each donor is added to wells of a 96-well round bottom microtiter plate. Dilutions of test materials (50 μl) is added in triplicate to microtiter wells. Test samples (of the protein of interest) are added for final dilution of 1:4; rhuIL-2 (R&D Systems, Minneapolis, Minn., catalog number 202-IL) is added to a final concentration of 1 μg/ml; anti-CD4 mAb (R&D Systems, clone 34930.11, catalog number MAB379) is added to a final concentration of 10 μg/ml. Cells are cultured for 7-8 days at 37° C. in 5% CO₂, and 1 μC of [³H] thymidine is added to wells for the last 16 hrs of culture. Cells are harvested and thymidine incorporation determined using a Packard TopCount. Data is expressed as the mean and standard deviation of triplicate determinations.

[1310] Samples of the protein of interest are screened in separate experiments and compared to the negative control treatment, anti-CD4 mAb, which inhibits proliferation of lymphocytes and the positive control treatment, IL-2 (either as recombinant material or supernatant), which enhances proliferation of lymphocytes.

[1311] One skilled in the art could easily modify the exemplified studies to test the activity of polynucleotides (e.g., gene therapy), antibodies, agonists, and/or antagonists and fragments and variants thereof.

### Example 46

### Assays for Protease Activity

[1312] The following assay may be used to assess protease activity of the polypeptides of the invention.

[1313] Gelatin and casein zymography are performed essentially as described (Heusen et al., Anal. Biochem., 102:196-202 (1980); Wilson et al., Journal of Urology, 149:653-658 (1993)). Samples are run on 10% polyacryamidel0.1% SDS gels containing 1% gelain orcasein, soaked in 2.5% triton at room temperature for 1 hour, and in 0.1M glycine, pH 8.3 at 37° C. 5 to 16 hours. After staining in amido black areas of proteolysis apear as clear areas agains the blue-black background. Trypsin (Sigma T8642) is used as a positive control.

[1314] Protease activity is also determined by monitoring the cleavage of n-a-benzoyl-L-arginine ethyl ester (BAEE) (Sigma B-4500. Reactions are set up in (25 mMNaPO₄, 1 mM EDTA, and 1 mM BAEE), pH 7.5. Samples are added and the change in adsorbance at 260 nm is monitored on the Beckman DU-6 spectrophotometer in the time-drive mode. Trypsin is used as a positive control.

[1315] Additional assays based upon the release of acid-soluble peptides from casein or hemoglobin measured as adsorbance at 280 nm or colorimetrically using the Folin method are performed as described in Bergmeyer, et al., Methods of Enzymatic Analysis, 5 (1984). Other assays involve the solubilization of chromogenic substrates (Ward, Applied Science, 251-317 (1983).

### Example 47

### Identifying Serine Protease Substrate Specificity

[1316] Methods known in the art or described herein may be used to determine the substrate specificity of the polypeptides of the present invention having serine protease activity. A preferred method of determining substrate specificity is by the use of positional scanning synthetic combinatorial libraries as described in GB 2 324 529 (incorporated herein in its entirety).

### Example 48

### Ligand Binding Assays

[1317] The following assay may be used to assess ligand binding activity of the polypeptides of the invention.

[1318] Ligand binding assays provide a direct method for ascertaining receptor pharmacology and are adaptable to a high throughput format. The purified ligand for a polypeptide is radiolabeled to high specific activity (50-2000 Ci/mmol) for binding studies. A determination is then made that the process of radiolabeling does not diminish the activity of the ligand towards its polypeptide. Assay conditions for buffers, ions, pH and other modulators such as nucleotides are optimized to establish a workable signal to noise ratio for both membrane and whole cell polypeptide sources. For these assays, specific polypeptide binding is defined as total associated radioactivity minus the radioactivity measured in the presence of an excess of unlabeled competing ligand. Where possible, more than one competing ligand is used to define residual nonspecific binding.

### Example 49

### Functional Assay in Xenopus Oocytes

[1319] Capped RNA transcripts from linearized plasmid templates encoding the polypeptides of the invention are synthesized in vitro with RNA polymerases in accordance with standard procedures. In vitro transcripts are suspended in water at a final concentration of 0.2 mg/ml. Ovarian lobes are removed from adult female toads, Stage V defolliculated oocytes are obtained, and RNA transcripts (10 ng/oocytc) are injected in a 50 nl bolus using a microinjection apparatus. Two electrode voltage clamps are used to measure the currents from individual Xenopus oocytes in response polypeptides and polypeptide agonist exposure. Recordings are made in Ca2+ free Barth's medium at room temperature. The Xenopus system can be used to screen known ligands and tissue/cell extracts for activating ligands.

### Example 50

### Microphysiometric Assays

[1320] Activation of a wide variety of secondary messenger systems results in extrusion of small amounts of acid from a cell. The acid formed is largely as a result of the increased metabolic activity required to fuel the intracellular signaling process. The pH changes in the media surrounding the cell are very small but are detectable by the CYTOSENSOR microphysiometer (Molecular Devices Ltd., Menlo Park, Calif.). The CYTOSENSOR is thus capable of detecting the activation of polypeptide which is coupled to an energy utilizing intracellular signaling pathway.

### Example 51

### Extract/Cell Supernatant Screening

[1321] A large number of mammalian receptors exist for which there remains, as yet, no cognate activating ligand (agonist). Thus, active ligands for these receptors may not be included within the ligands banks as identified to date. Accordingly, the polypeptides of the invention can also be functionally screened (using calcium, cAMP, microphysiometer, oocyte electrophysiology, etc., functional screens) against tissue extracts to identify its natural ligands. Extracts that produce positive functional responses can be sequentially subfractionated until an activating ligand is isolated and identified.

### Example 52

### Calcium and cAMP Functional Assays

[1322] Seven transmembrane receptors which are expressed in HEK 293 cells have been shown to be coupled functionally to activation of PLC and calcium mobilization and/or cAMP stimulation or inhibition. Basal calcium levels in the HEK 293 cells in receptor-transfected or vector control cells were observed to be in the normal, 100 nM to 200 nM, range. HEK 293 cells expressing recombinant receptors are loaded with fura 2 and in a single day >150 selected ligands or tissue/cell extracts are evaluated for agonist induced calcium mobilization. Similarly, HEK 293 cells expressing recombinant receptors are evaluated for the stimulation or inhibition of cAMP production using standard cAMP quantitation assays. Agonists presenting a calcium transient or cAMP fluctuation are tested in vector control cells to determine if the response is unique to the transfected cells expressing receptor.

### Example 53

### ATP-Binding Assay

[1323] The following assay may be used to assess ATP-binding activity of polypeptides of the invention.

[1324] ATP-binding activity of the polypeptides of the invention may be detected using the ATP-binding assay described in U.S. Pat. No. 5,858,719, which is herein incorporated by reference in its entirety. Briefly, ATP-binding to polypeptides of the invention is measured via photoaffinity labeling with 8-azido-ATP in a competition assay. Reaction mixtures containing 1 mg/ml of the ABC transport protein of the present invention are incubated with varying concentrations of ATP, or the non-hydrolyzable ATP analog adenyl-5′-imidodiphosphate for 10 minutes at 4° C. A mixture of 8-azido-ATP (Sigma Chem. Corp., St. Louis, Mo.) plus 8-azido-ATP (³²P-ATP) (5 mCi/μmol, ICN, Irvine Calif.) is added to a final concentration of 100 μM and 0.5 ml aliquots are placed in the wells of a porcelain spot plate on ice. The plate is irradiated using a short wave 254 nm UV lamp at a distance of 2.5 cm from the plate for two one-minute intervals with a one-minute cooling interval in between. The reaction is stopped by addition of dithiothreitol to a final concentration of 2 mM. The incubations are subjected to SDS-PAGE electrophoresis, dried, and autoradiographed. Protein bands corresponding to the particular polypeptides of the invention are excised, and the radioactivity quantified. A decrease in radioactivity with increasing ATP or adenly-5′-imidodiphosphate provides a measure of ATP affinity to the polypeptides.

### Example 54

### Small Molecule Screening

[1325] This invention is particularly useful for screening therapeutic compounds by using the polypeptides of the invention, or binding fragments thereof, in any of a variety of drug screening techniques. The polypeptide or fragment employed in such a test may be affixed to a solid support, expressed on a cell surface, free in solution, or located intracellularly. One method of drug screening utilizes eukaryotic or prokaryotic host cells which are stably transformed with recombinant nucleic acids expressing the polypeptide or fragment. Drugs are screened against such transformed cells in competitive binding assays. One may measure, for example, the formulation of complexes between the agent being tested and polypeptide of the invention.

[1326] Thus, the present invention provides methods of screening for drugs or any other agents which affect activities mediated by the polypeptides of the invention. These methods comprise contacting such an agent with a polypeptide of the invention or fragment thereof and assaying for the presence of a complex between the agent and the polypeptide or fragment thereof, by methods well known in the art. In such a competitive binding assay, the agents to screen are typically labeled. Following incubation, free agent is separated from that present in bound form, and the amount of free or uncomplexed label is a measure of the ability of a particular agent to bind to the polypeptides of the invention.

[1327] Another technique for drug screening provides high throughput screening for compounds having suitable binding affinity to the polypeptides of the invention, and is described in great detail in European Patent Application 84/03564, published on Sep. 13, 1984, which is herein incorporated by reference in its entirety. Briefly stated, large numbers of different small molecule test compounds are synthesized on a solid substrate, such as plastic pins or some other surface. The test compounds are reacted with polypeptides of the invention and washed. Bound polypeptides are then detected by methods well known in the art. Purified polypeptides are coated directly onto plates for use in the aforementioned drug screening techniques. In addition, non-neutralizing antibodies may be used to capture the peptide and immobilize it on the solid support.

[1328] This invention also contemplates the use of competitive drug screening assays in which neutralizing antibodies capable of binding polypeptides of the invention specifically compete with a test compound for binding to the polypeptides or fragments thereof. In this manner, the antibodies are used to detect the presence of any peptide which shares one or more antigenic epitopes with a polypeptide of the invention.

### Example 55

### Phosphorylation Assay

[1329] In order to assay for phosphorylation activity of the polypeptides of the invention, a phosphorylation assay as described in U.S. Pat. No. 5,958,405 (which is herein incorporated by reference) is utilized. Briefly, phosphorylation activity may be measured by phosphorylation of a protein substrate using gamma-labeled ³²P-ATP and quantitation of the incorporated radioactivity using a gamma radioisotope counter. The polypeptides of the invention are incubated with the protein substrate, ³²P-ATP, and a kinase buffer. The ³²P incorporated into the substrate is then separated from free ³²P ATP by electrophoresis, and the incorporated ³²P is counted and compared to a negative control. Radioactivity counts above the negative control are indicative of phosphorylation activity of the polypeptides of the invention.

### Example 56

### Detection of Phosphorylation Activity (Activation) of the Polypeptides of the Invention in the Presence of Polypeptide Ligands

[1330] Methods known in the art or described herein may be used to determine the phosphorylation activity of the polypeptides of the invention. A preferred method of determining phosphorylation activity is by the use of the tyrosine phosphorylation assay as described in U.S. Pat. No. 5,817,471 (incorporated herein by reference).

### Example 57

### Identification of Signal Transduction Proteins that Interact with Polypeptides of the Present Invention

[1331] The purified polypeptides of the invention are research tools for the identification, characterization and purification of additional signal transduction pathway proteins or receptor proteins. Briefly, labeled receptor PTK polypeptide is useful as a reagent for the purification of molecules with which it interacts. In one embodiment of affinity purification, receptor PTK polypeptide is covalently coupled to a chromatography column. Cell-free extract derived from putative target cells, such as carcinoma tissues, is passed over the column, and molecules with appropriate affinity bind to the receptor PTK polypeptides, or specific phosphotyrosine-recognition domains thereof. The receptor PTK polypeptide interacting protein-complex is recovered from the column, dissociated, and the recovered molecule subjected to N-terminal protein sequencing. This amino acid sequence is then used to identify the captured molecule or to design degenerate oligonucleotide probes for cloning the relevant gene from an appropriate cDNA library.

### Example 58

### IL-6 Bioassay

[1332] To test the proliferative effects of the polypeptides of the invention, the IL-6 Bioassay as described by Marz et al. is utilized (Proc. Natl. Acad. Sci., U.S.A., 95:3251-56 (1998), which is herein incorporated by reference). Briefly, IL-6 dependent B9 murine cells are washed three times in IL-6 free medium and plated at a concentration of 5,000 cells per well in 50 μl, and 50 μl of the IL-6-like polypeptide is added. After 68 hrs. at 37° C., the number of viable cells is measured by adding the tetrazolium salt thiazolyl blue (MTT) and incubating for a further 4 hrs. at 37° C. B9 cells are lysed by SDS and optical density is measured at 570 nm. Controls containing IL-6 (positive) and no cytokine (negative) are utilized. Enhanced proliferation in the test sample(s) relative to the negative control is indicative of proliferative effects mediated by polypeptides of the invention.

### Example 59

### Support of Chicken Embryo Neuron Survival

[1333] To test whether sympathetic neuronal cell viability is supported by polypeptides of the invention, the chicken embryo neuronal survival assay of Senaldi et al is utilized (Proc. Natl. Acad. Sci., U.S.A., 96:11458-63 (1998), which is herein incorporated by reference). Briefly, motor and sympathetic neurons are isolated from chicken embryos, resuspended in L15 medium (with 10% FCS, glucose, sodium selenite, progesterone, conalbumin, putrescine, and insulin; Life Technologies, Rockville, Md.) and Dulbecco's modified Eagles medium [with 10% FCS, glutamine, penicillin, and 25 mM Hepes buffer (pH 7.2); Life Technologies, Rockville, Md.], respectively, and incubated at 37° C. in 5% CO₂ in the presence of different concentrations of the purified IL-6-like polypeptide, as well as a negative control lacking any cytokine. After 3 days, neuron survival is determined by evaluation of cellular morphology, and through the use of the colorimetric assay of Mosmann (Mossman, T., J. Immunol. Methods, 65:55-63 (1983)). Enhanced neuronal cell viability as compared to the controls lacking cytokine is indicative of the ability of the inventive purified IL-6-like polypeptide(s) to enhance the survival of neuronal cells.

### Example 60

### Assay for Phosphatase Activity

[1334] The following assay may be used to assess serine/threonine phosphatase (PTPase) activity of the polypeptides of the invention.

[1335] In order to assay for serine/threonine phosphatase (PTPase) activity, assays can be utilized which are widely known to those skilled in the art. For example, the serine/threonine phosphatase (PSPase) activity is measured using a PSPase assay kit from New England Biolabs, Inc. Myelin basic protein (MyBP), a substrate for PSPase, is phosphorylated on serine and threonine residues with cAMP-dependent Protein Kinase in the presence of [³²P]ATP. Protein serine/threonine phosphatase activity is then determined by measuring the release of inorganic phosphate from ³²P-labeled MyBP.

### Example 61

### Interaction of Serine/Threonine Phosphatases with Other Proteins

[1336] The polypeptides of the invention with serine/threonine phosphatase activity as determined in Example 60 are research tools for the identification, characterization and purification of additional interacting proteins or receptor proteins, or other signal transduction pathway proteins. Briefly, labeled polypeptide(s) of the invention is useful as a reagent for the purification of molecules with which it interacts. In one embodiment of affinity purification, polypeptide of the invention is covalently coupled to a chromatography column. Cell-free extract derived from putative target cells, such as neural or liver cells, is passed over the column, and molecules with appropriate affinity bind to the polypeptides of the invention. The polypeptides of the invention-complex is recovered from the column, dissociated, and the recovered molecule subjected to N-terminal protein sequencing. This amino acid sequence is then used to identify the captured molecule or to design degenerate oligonucleotide probes for cloning the relevant gene from an appropriate cDNA library.

### Example 62

### Assaying for Heparanase Activity

[1337] In order to assay for heparanase activity of the polypeptides of the invention, the heparanase assay described by Vlodavsky et al is utilized (Vlodavsky, I., et al., Nat. Med., 5:793-802 (1999)). Briefly, cell lysates, conditioned media or intact cells (1×10⁶ cells per 35-mrnm dish) are incubated for 18 hrs at 37° C., pH 6.2-6.6, with ³⁵S-labeled ECM or soluble ECM derived peak I proteoglycans. The incubation medium is centrifuged and the supernatant is analyzed by gel filtration on a Sepharose CL-6B column (0.9×30 cm). Fractions are eluted with PBS and their radioactivity is measured. Degradation fragments of heparan sulfate side chains are eluted from Sepharose 6B at 0.5<Kₐᵥ<0.8 (peak II). Each experiment is done at least three times. Degradation fragments corresponding to “peak II,” as described by Vlodavsky et al., is indicative of the activity of the polypeptides of the invention in cleaving heparan sulfate.

### Example 63

### Immobilization of Biomolecules

[1338] This example provides a method for the stabilization of polypeptides of the invention in non-host cell lipid bilayer constucts (see, e.g., Bieri et al., Nature Biotech 17:1105-1108 (1999), hereby incorporated by reference in its entirety herein) which can be adapted for the study of polypeptides of the invention in the various functional assays described above. Briefly, carbohydrate-specific chemistry for biotinylation is used to confine a biotin tag to the extracellular domain of the polypeptides of the invention, thus allowing uniform orientation upon immobilization. A 50 uM solution of polypeptides of the invention in washed membranes is incubated with 20 mM NaIO4 and 1.5 mg/ml (4 mM) BACH or 2 mg/ml (7.5 mM) biotin-hydrazide for 1 hr at room temperature (reaction volume, 150 ul). Then the sample is dialyzed (Pierce Slidealizer Cassett, 10 kDa cutoff; Pierce Chemical Co., Rockford Ill.) at 4C first for 5 h, exchanging the buffer after each hour, and finally for 12 h against 500 ml buffer R (0.15 M NaCl, 1 mM MgCl2, 10 mM sodium phosphate, pH 7). Just before addition into a cuvette, the sample is diluted 1:5 in buffer ROG50 (Buffer R supplemented with 50 mM octylglucoside).

### Example 64

### TAQMAN

[1339] Quantitative PCR (QPCR). Total RNA from cells in culture are extracted by Trizol separation as recommended by the supplier (LifeTechnologies). (Total RNA is treated with DNase I (Life Technologies) to remove any contaminating genomic DNA before reverse transcription.) Total RNA (50 ng) is used in a one-step, 50 ul, RT-QPCR, consisting of Taqman Buffer A (Perkin-Elmer; 50 mM KClI10 mM Tris, pH 8.3), 5.5 mM MgCl₂, 240 μM each dNTP, 0.4 units RNase inhibitor(Promega), 8%glycerol, 0.012% Tween-20, 0.05% gelatin, 0.3 uM primers, 0.1 uM probe, 0.025 units Amplitaq Gold (Perkin-Elmer) and 2.5 units Superscript II reverse transcriptase (Life Technologies). As a control for genomic contamination, parallel reactions are setup without reverse transcriptase. The relative abundance of (unknown) and 18S RNAs are assessed by using the Applied Biosystems Prism 7700 Sequence Detection System (Livak, K. J., Flood, S. J., Marmaro, J., Giusti, W. & Deetz, K. (1995) PCR Methods Appl. 4, 357-362). Reactions are carried out at 48° C. for 30 min, 95° C. for 10 min, followed by 40 cycles of 95° C. for 15s, 60° C. for 1 min. Reactions are performed in triplicate.

[1340] Primers (f & r) and FRET probes sets are designed using Primer Express Software (Perkin-Elmer). Probes are labeled at the 5′-end with the reporter dye 6-FAM and on the 3′-end with the quencher dye TAMRA (Biosource International, Camarillo, Calif. or Perkin-Elmer).

### Example 65

### Assays for Metalloproteinase Activity

[1341] Metalloproteinases (EC 3.4.24.-) are peptide hydrolases which use metal ions, such as Zn²⁺, as the catalytic mechanism. Metalloproteinase activity of polypeptides of the present invention can be assayed according to the following methods.

[1342] Proteolysis of Alpha-2-Macroglobulin

[1343] To confirm protease activity, purified polypeptides of the invention are mixed with the substrate alpha-2-macroglobulin (0.2 unit/ml; Boehringer Mannheim, Germany) in 1×assay buffer (50 mM HEPES, pH 7.5, 0.2 M NaCl, 10 mM CaCl₂, 25 μM ZnCl₂ and 0.05% Brij-35) and incubated at 37° C. for 1-5 days. Trypsin is used as positive control. Negative controls contain only alpha-2-macroglobulin in assay buffer. The samples are collected and boiled in SDS-PAGE sample buffer containing 5% 2-mercaptoethanol for 5-min, then loaded onto 8% SDS-polyacrylamide gel. After electrophoresis the proteins are visualized by silver staining. Proteolysis is evident by the appearance of lower molecular weight bands as compared to the negative control.

[1344] Inhibition of Alpha-2-Macro Globulin Proteolysis by Inhibitors of Metalloproteinases

[1345] Known metalloproteinase inhibitors (metal chelators (EDTA, EGTA, AND HgCl₂), peptide metalloproteinase inhibitors (TIMP-1 and TIMP-2), and commercial small molecule MMP inhibitors) are used to characterize the proteolytic activity of polypeptides of the invention. The three synthetic MMP inhibitors used are: MMP inhibitor I, [IC₅₀=1.0 μM against MMP-1 and MMP-8; IC₅₀=30 μM against MMP-9; IC₅₀=150 μM against MMP-3]; MMP-3 (stromelysin-1) inhibitor I [IC₅₀=5 μM against MMP-3], and MMP-3 inhibitor II [Kᵢ=130 nM against MMP-3]; inhibitors available through Calbiochem, catalog #444250, 444218, and 444225, respectively). Briefly, different concentrations of the small molecule MMP inhibitors are mixed with purified polypeptides of the invention (50 μg/ml) in 22.9 μl of 1×HEPES buffer (50 mM HEPES, pH 7.5, 0.2 M NaCl, 10 mM CaCl₂, 25 μM ZnCl₂ and 0.05%Brij-35) and incubated at room temperature (24° C.) for 2-hr, then 7.1 μL of substrate alpha-2-macroglobulin (0.2 unit/ml) is added and incubated at 37° C. for 20-hr. The reactions are stopped by adding 4×sample buffer and boiled immediately for 5 minutes. After SDS-PAGE, the protein bands are visualized by silver stain.

[1346] Synthetic Fluorogenic Peptide Substrates Cleavage Assay

[1347] The substrate specificity for polypeptides of the invention with demonstrated metalloproteinase activity can be determined using synthetic fluorogenic peptide substrates (purchased from BACHEM Bioscience Inc). Test substrates include, M-1985, M-2225, M-2105, M-2110, and M-2255. The first four are MMP substrates and the last one is a substrate of tumor necrosis factor-α (TNF-α) converting enzyme (TACE). All the substrates are prepared in 1:1 dimethyl sulfoxide (DMSO) and water. The stock solutions are 50-500 μM. Fluorescent assays are performed by using a Perkin Elmer LS 50B luminescence spectrometer equipped with a constant temperature water bath. The excitation λ is 328 nm and the emission λ is 393 nm. Briefly, the assay is carried out by incubating 176 μl 1×HEPES buffer (0.2 M NaCl, 10 mM CaCl₂, 0.05% Brij-35 and 50 mM HEPES, pH 7.5) with 4 μl of substrate solution (50 uM) at 25° C. for 15 minutes, and then adding 20 μl of a purified polypeptide of the invention into the assay cuvett. The final concentration of substrate is 1 μM. Initial hydrolysis rates are monitored for 30-min.

### Example 66

### Characterization of the cDNA Contained in a Deposited Plasmid

[1348] The size of the cDNA insert contained in a deposited plasmid may be routinely determined using techniques known in the art, such as PCR amplification using synthetic primers hybridizable to the 3′ and 5′ ends of the cDNA sequence. For example, two primers of 17-30 nucleotides derived from each end of the cDNA (i.e., hybridizable to the absolute 5′ nucleotide or the 3 nucleotide end of the sequence of SEQ ID NO:X, respectively) are synthesized and used to amplify the cDNA using the deposited cDNA plasmid as a template. The polymerase chain reaction is carried out under routine conditions, for instance, in 25 ul of reaction mixture with 0.5 ug of the above cDNA template. A convenient reaction mixture is 1.5-5 mM MgCl₂, 0.01% (w/v) gelatin, 20 uM each of dATP, dCTP, dGTP, dTTP, 25 pmol of each primer and 0.25 Unit of Taq polymerase. Thirty five cycles of PCR (denaturation at 94 degree C. for 1 min; annealing at 55 degree C. for 1 min; elongation at 72 degree C. for 1 min) are performed with a Perkin-Elmer Cetus automated thermal cycler. The amplified product is analyzed by agarose gel electrophoresis. The PCR product is verified to be the selected sequence by subcloning and sequencing the DNA product.

[1349] Use of the above methodologies and/or other methodologies known in the art generates fragments from the clone corresponding to the approximate fragments described in Table 8, below. Accordingly, Table 8 provides a physical characterization of certain clones encompassed by the invention. The first column provides the unique clone identifier, “Clone ID NO:Z”, for cDNA clones of the invention, as described in Table 1A. The second column provides the approximate size of the cDNA insert contained in the corresponding cDNA clone.

TABLE 8

| | cDNA |
|---|---|
| Clone ID | Insert |
| NO: Z | Size: |
| No Entries | |

[1350] It will be clear that the invention may be practiced otherwise than as particularly described in the foregoing description and examples. Numerous modifications and variations of the present invention are possible in light of the above teachings and, therefore, are within the scope of the appended claims.

[1351] The entire disclosure of each document cited (including patents, patent applications, journal articles, abstracts, laboratory manuals, books, or other disclosures) in the Background of the Invention, Detailed Description, and Examples is hereby incorporated herein by reference. In addition, the CD-R copy of the sequence listing submitted herewith and the corresponding computer readable form are both incorporated herein by reference in their entireties. The specification and Sequence Listing of each of the following U.S. applications are herein incorporated by reference in their entirety: Application No. 60/179,065, filed on Jan. 31, 2000; Application No. 60/180,628, filed on Feb. 4, 2000; Application No. 60/214,886, filed on Jun. 28, 2000; Application No. 60/217,487, filed on Jul. 11, 2000; Application No. 60/225,758, filed on Aug. 14, 2000; Application No. 60/220,963, filed on Jul. 26, 2000; Application No. 60/217,496, filed on Jul. 11, 2000; Application No. 60/225,447, filed on Aug. 14, 2000; Application No. 60/218,290, filed on Jul. 14, 2000; Application No. 60/225,757, filed on Aug. 14, 2000; Application No. 60/226,868, filed on Aug. 22, 2000; Application No. 60/216,647, filed on Jul. 7, 2000; Application No. 60/225,267, filed on Aug. 14, 2000; Application No. 60/216,880, filed on Jul. 7, 2000; Application No. 60/225,270, filed on Aug. 14, 2000; Application No. 60/251,869, filed on Dec. 8, 2000; Application No. 60/235,834, filed on Sep. 27, 2000; Application No. 60/234,274, filed on Sep. 21, 2000; Application No. 60/234,223, filed on Sep. 21, 2000; Application No. 60/228,924, filed on Aug. 30, 2000; Application No. 60/224,518, filed on Aug. 14, 2000; Application No. 60/236,369, filed on Sep. 29, 2000; Application No. 60/224,519, filed on Aug. 14, 2000; Application No. 60/220,964, filed on Jul. 26, 2000; Application No. 60/241,809, filed on Oct. 20, 2000; Application No. 60/249,299, filed on Nov. 17, 2000; Application No. 60/236,327, filed on Sep. 29, 2000; Application No. 60/241,785, filed on Oct. 20, 2000; Application No. 60/244,617, filed on Nov. 1, 2000; Application No. 60/225,268, filed on Aug. 14, 2000; Application No. 60/236,368, filed on Sep. 29, 2000; Application No. 60/251,856, filed on Dec. 8, 2000; Application No. 60/251,868, filed on Dec. 8, 2000; Application No. 60/229,344, filed on Sep. 1, 2000; Application No. 60/234,997, filed on Sep. 25, 2000; Application No. 60/229,343, filed on Sep. 1, 2000; Application No. 60/229,345, filed on Sep. 1, 2000; Application No. 60/229,287, filed on Sep. 1, 2000; Application No. 60/229,513, filed on Sep. 5, 2000; Application No. 60/231,413, filed on Sep. 8, 2000; Application No. 60/229,509, filed on Sep. 5, 2000; Application No. 60/236,367, filed on Sep. 29, 2000; Application No. 60/237,039, filed on Oct. 2, 2000; Application No. 60/237,038, filed on Oct. 2, 2000; Application No. 60/236,370, filed on Sep. 29, 2000; Application No. 60/236,802, filed on Oct. 2, 2000; Application No. 60/237,037, filed on Oct. 2, 2000; Application No. 60/237,040, filed on Oct. 2, 2000; Application No. 60/240,960, filed on Oct. 20, 2000; Application No. 60/239,935, filed on Oct. 13, 2000; Application No. 60/239,937, filed on Oct. 13, 2000; Application No. 60/241,787, filed on Oct. 20, 2000; Application No. 60/246,474, filed on Nov. 8, 2000; Application No. 60/246,532, filed on Nov. 8, 2000; Application No. 60/249,216, filed on Nov. 17, 2000; Application No. 60/249,210, filed on Nov. 17, 2000; Application No. 60/226,681, filed on Aug. 22, 2000; Application No. 60/225,759, filed on Aug. 14, 2000; Application No. 60/225,213, filed on Aug. 14, 2000; Application No. 60/227,182, filed on Aug. 22, 2000; Application No. 60/225,214, filed on Aug. 14, 2000; Application No. 60/235,836, filed on Sep. 27, 2000; Application No. 60/230,438, filed on Sep. 6, 2000; Application No. 60/215,135, filed on Jun. 30, 2000; Application No. 60/225,266, filed on Aug. 14, 2000; Application No. 60/249,218, filed on Nov. 17, 2000; Application No. 60/249,208, filed on Nov. 17, 2000; Application No. 60/249,213, filed on Nov. 17, 2000; Application No. 60/249,212, filed on Nov. 17, 2000; Application No. 60/249,207, filed on Nov. 17, 2000; Application No. 60/249,245, filed on Nov. 17, 2000; Application No. 60/249,244, filed on Nov. 17, 2000; Application No. 60/249,217, filed on Nov. 17, 2000; Application No. 60/249,211, filed on Nov. 17, 2000; Application No. 60/249,215, filed on Nov. 17, 2000; Application No. 60/249,264, filed on Nov. 17, 2000; Application No. 60/249,214, filed on Nov. 17, 2000; Application No. 60/249,297, filed on Nov. 17, 2000; Application No. 60/232,400, filed on Sep. 14, 2000; Application No. 60/231,242, filed on Sep. 8, 2000; Application No. 60/232,081, filed on Sep. 8, 2000; Application No. 60/232,080, filed on Sep. 8, 2000; Application No. 60/231,414, filed on Sep. 8, 2000; Application No. 60/231,244, filed on Sep. 8, 2000; Application No. 60/233,064, filed on Sep. 14, 2000; Application No. 60/233,063, filed on Sep. 14, 2000; Application No. 60/232,397, filed on Sep. 14, 2000; Application No. 60/232,399, filed on Sep. 14, 2000; Application No. 60/232,401, filed on Sep. 14, 2000; Application No. 60/241,808, filed on Oct. 20, 2000; Application No. 60/241,826, filed on Oct. 20, 2000; Application No. 60/241,786, filed on Oct. 20, 2000; Application No. 60/241,221, filed on Oct. 20, 2000; Application No. 60/246,475, filed on Nov. 8, 2000; Application No. 60/231,243, filed on Sep. 8, 2000; Application No. 60/233,065, filed on Sep. 14, 2000; Application No. 60/232,398, filed on Sep. 14, 2000; Application No. 60/234,998, filed on Sep. 25, 2000; Application No. 60/246,477, filed on Nov. 8, 2000; Application No. 60/246,528, filed on Nov. 8, 2000; Application No. 60/246,525, filed on Nov. 8, 2000; Application No. 60/246,476, filed on Nov. 8, 2000; Application No. 60/246,526, filed on Nov. 8, 2000; Application No. 60/249,209, filed on Nov. 17, 2000; Application No. 60/246,527, filed on Nov. 8, 2000; Application No. 60/246,523, filed on Nov. 8, 2000; Application No. 60/246,524, filed on Nov. 8, 2000; Application No. 60/246,478, filed on Nov. 8, 2000; Application No. 60/246,609, filed on Nov. 8, 2000; Application No. 60/246,613, filed on Nov. 8, 2000; Application No. 60/249,300, filed on Nov. 17, 2000; Application No. 60/249,265, filed on Nov. 17, 2000; Application No. 60/246,610, filed on Nov. 8, 2000; Application No. 60/246,611, filed on Nov. 8, 2000; Application No. 60/230,437, filed on Sep. 6, 2000; Application No. 60/251,990, filed on Dec. 8, 2000; Application No. 60/251,988, filed on Dec. 5, 2000; Application No. 60/251,030, filed on Dec. 5, 2000; Application No. 60/251,479, filed on Dec. 6, 2000; Application No. 60/256,719, filed on Dec. 5, 2000; Application No. 60/250,160, filed on Dec. 1, 2000; Application No. 60/251,989, filed on Dec. 8, 2000; Application No. 60/250,391, filed on Dec. 1, 2000; Application No. 60/254,097, filed on Dec. 11, 2000; and application Ser. No. 09/764,867, filed Jan. 17, 2001.

[1352] Moreover, the microfiche copy and the corresponding computer readable form of the Sequence Listing of U.S. Application Serial No. 60/179,065, and the hard copy of and the corresponding computer readable form of the Sequence Listing of U.S. Application Serial No. 60/180,628 are also incorporated herein by reference in their entireties.

The application's sequence listing, which the Patent Office published only in electronic form, follows.

SEQUENCE LISTING (392 sequences)

SEQ ID NO: 1 - DNA, 733 bp, Homo sapiens
gggatccggagcccaaatcttctgacaaaactcacacatgcccaccgtgcccagcacctgaattcgagggtgcaccgtcagtcttcctcttccccccaaaacccaaggacaccctcatgatctcccggactcctgaggtcacatgcgtggtggtggacgtaagccacgaagaccctgaggtcaagttcaactggtacgtggacggcgtggaggtgcataatgccaagacaaagccgcgggaggagcagtacaacagcacgtaccgtgtggtcagcgtcctcaccgtcctgcaccaggactggctgaatggcaaggagtacaagtgcaaggtctccaacaaagccctcccaacccccatcgagaaaaccatctccaaagccaaagggcagccccgagaaccacaggtgtacaccctgcccccatcccgggatgagctgaccaagaaccaggtcagcctgacctgcctggtcaaaggcttctatccaagcgacatcgccgtggagtgggagagcaatgggcagccggagaacaactacaagaccacgcctcccgtgctggactccgacggctccttcttcctctacagcaagctcaccgtggacaagagcaggtggcagcaggggaacgtcttctcatgctccgtgatgcatgaggctctgcacaaccactacacgcagaagagcctctccctgtctccgggtaaatgagtgcgacggccgcgactctagaggat

SEQ ID NO: 2 - protein, 5 aa, Homo sapiens
  misc_feature (3): Xaa equals any of the twenty naturally occurring L- amino acids
WSXWS

SEQ ID NO: 3 - DNA, 86 bp, Artificial Sequence
  Synthetic sequence with 4 tandem copies of the GAS binding site found in the IRF1 promoter (Rothman et al., Immunity 1:457-468 (1994)), 18 nucleotides complementary to the SV40 early promoter, and a Xho I restriction site.
gcgcctcgagatttccccgaaatctagatttccccgaaatgatttccccgaaatgatttccccgaaatatctgccatctcaattag

SEQ ID NO: 4 - DNA, 27 bp, Artificial Sequence
  Synthetic sequence complementary to the SV40 promoter; includes a Hind III restriction site.
gcggcaagctttttgcaaagcctaggc

SEQ ID NO: 5 - DNA, 271 bp, Artificial Sequence
  Synthetic promoter for use in biological assays; includes GAS binding sites found in the IRF1 promoter (Rothman et al., Immunity 1:457-468 (1994)).
ctcgagatttccccgaaatctagatttccccgaaatgatttccccgaaatgatttccccgaaatatctgccatctcaattagtcagcaaccatagtcccgcccctaactccgcccatcccgcccctaactccgcccagttccgcccattctccgccccatggctgactaattttttttatttatgcagaggccgaggccgcctcggcctctgagctattccagaagtagtgaggaggcttttttggaggcctaggcttttgcaaaaagctt

SEQ ID NO: 6 - DNA, 32 bp, Artificial Sequence
  Synthetic primer complementary to human genomic EGR-1 promoter sequence (Sakamoto et al., Oncogene 6:867-871 (1991)); includes a Xho I restriction site.
gcgctcgagggatgacagcgatagaaccccgg

SEQ ID NO: 7 - DNA, 31 bp, Artificial Sequence
  Synthetic primer complementary to human genomic EGR-1 promoter sequence (Sakamoto et al., Oncogene 6:867-871 (1991)); includes a Hind III restriction site.
gcgaagcttcgcgactccccggatccgcctc

SEQ ID NO: 8 - DNA, 12 bp, Homo sapiens
ggggactttccc

SEQ ID NO: 9 - DNA, 73 bp, Artificial Sequence
  Synthetic primer with 4 tandem copies of the NF-KB binding site (GGGGACTTTCCC), 18 nucleotides complementary to the 5' end of the SV40 early promoter sequence, and a XhoI restriction site.
gcggcctcgaggggactttcccggggactttccggggactttccgggactttccatcctgccatctcaattag

SEQ ID NO: 10 - DNA, 256 bp, Artificial Sequence
  Synthetic promoter for use in biological assays; includes NF-KB binding sites.
ctcgaggggactttcccggggactttccggggactttccgggactttccatctgccatctcaattagtcagcaaccatagtcccgcccctaactccgcccatcccgcccctaactccgcccagttccgcccattctccgccccatggctgactaattttttttatttatgcagaggccgaggccgcctcggcctctgagctattccagaagtagtgaggaggcttttttggaggcctaggcttttgcaaaaagctt

SEQ ID NO: 11 - DNA, 335 bp, Homo sapiens
  misc_feature (66): n equals a,t,g, or c
  misc_feature (70): n equals a,t,g, or c
  misc_feature (257): n equals a,t,g, or c
gaattcggcacagtgaaagagaaggaattggcgctgccacaactggttagccaggctggcgggtantggngcggtttgcgtcaagttctcggtctggccaatctgggcgagatgccggatgatatcgccttgctggtgttgagcaggaaccttgcatggaatcctgggataagccccggtcgcatccaattcgccgagcaggatgggaaccttcgtcctgaagtttgtcggtgaagtccgtctgacgctgtgttcancttctgggatgccacggattgaaaagattttcaccgcgttgaatttttcggccatcgtcatcgacttggactgaaacg

SEQ ID NO: 12 - DNA, 313 bp, Homo sapiens
  misc_feature (108): n equals a,t,g, or c
agggggtgcccccctataagcaaatacagcttggattacaacactcaagtcctttcatatatatggaaagccttcccaagaaagatgagaaacaagccctgacagtgnaagacgatgsataaatacctaactcctcaatgcccagatacccaagaacatctactagcgttagacacatccagaaaaacattacctcaccaaatgatttaaataagttaccagggaccaatccttwaggaaacagagatgtggaccttttcagacagattcaaaatagtgaggaaactcagagaaattcaggttaacaaggrga

SEQ ID NO: 13 - DNA, 288 bp, Homo sapiens
  misc_feature (248): n equals a,t,g, or c
  misc_feature (288): n equals a,t,g, or c
aattcggcagagctcagtctcaaaaatgtcattatccattcagtcttttcagctacaagcgggctcaactccagactctccttctctcccacttccaacagccaatctgttaccacatcctatctgcctgccctcaaacaggtctcttgtcactgacctctcctctttagacccctccgccagtttttgtttattgtttcccaaagtaaggcacatatgccactggtgagatgcctggtaaaggtaantagatgaaccttttaaaatagccattatggccacacgggn

SEQ ID NO: 14 - DNA, 87 bp, Homo sapiens
gcagaatttgaaatgctcttgggtcatagggatgccctcttgagctttgtcactgccattaggactttatctagctttattttaggt

SEQ ID NO: 15 - DNA, 506 bp, Homo sapiens
  misc_feature (458): n equals a,t,g, or c
  misc_feature (475): n equals a,t,g, or c
aattcggcacaggcactaggagcatttgctgtattctcccttttgtatattgggtctctggaagcctacagcgtggttagagctgactgaatattcttagatgtgtggcacatcctacgtgtggctgggtactatggatagttttgcaggccatgatgtgcagtgtccctttagcagtcattaactcacagtgagttatcaatgggtgttagttctctgtgggtctgacaacttagtatwgtgaaaagagtgctggcctgtgctgaacatgytggagaagagcttgcctggccacagggacacagccacgcagatccagcatgtgtctcccatgtgccmagtggagcccccagccaagaaggcagccacactagcagagggtgacaaggacaatgacatttgaccttgttttgttcagcgacaattgagggagggaagacaagggagggcagcccggntttggggagaagttggntgaggttgtattttgggagaagaaggccaag

SEQ ID NO: 16 - DNA, 380 bp, Homo sapiens
aattcggcagagactttgttaaataactaattctcatttcaagaaacagctcttgacttgctatttagccctgggagagactggatgattatcataggaaatcaggagacgtggaaactaggtgttatttgatttcaacaatccataaatacaggtgtgcctaggagcactccattttcaagtggacatagtatttatgaaatcaggcttcaggatgtcctgaaggcataagtcagtggttcacactcatggtgtatccactgcagaagtcttactcttacaggctatgttatgacctctccatctacagacttaaagtttggcgagaagtttgctatggccagttgaccaacaggacatttaagcctgacttacagata

SEQ ID NO: 17 - DNA, 614 bp, Homo sapiens
  misc_feature (496): n equals a,t,g, or c
  misc_feature (536): n equals a,t,g, or c
  misc_feature (580): n equals a,t,g, or c
  misc_feature (584): n equals a,t,g, or c
  misc_feature (586): n equals a,t,g, or c
gcgcggggaggctggtcccaaccttgcgtgggcttcgcgtgggcccggcctcgccgctgcggtcgcccgcctggcatggccaactgggtgttctgtaatcgctgcttccagccgccccacaggacgtcgtgcttcagcctcaccaactgcgggcacgtgtactgcgacgcctgcctcggcaaagaccgacgcagatatccaggcattcttcatgagcatagacagtctgtgtaagaagtactccagggaaacctcccaggtgagctgtgaggggtgtggcttggttccgtgatgagccaggtgcactatcccgagaccatggagctatgaggggtgtgcttggttctgtgatgagccaggtgcactatcccgagaccatggagctgtgaggggtgtgcttggttctgtgatgagccaggtgcactatcccgagaccatggagctgtgggagttgtgcttggttctgtgatgagccaggtgcactatcctgagaccntggagctgtggggggtgtgcttggwtcygtgatragccangtgcgctatccygagaccatggagctgtggggggtgtgcttggnttcngngatgaaccaagtgcgctatcccgagacc

SEQ ID NO: 18 - DNA, 242 bp, Homo sapiens
  misc_feature (203): n equals a,t,g, or c
  misc_feature (205): n equals a,t,g, or c
gcttcattgacctcaaccatgatcatcccggtgtccctgactcccacactagacaccctaggaaccagacatctctagatcttctagtctgctgttcatctaccatgggctctgccccaacttccacagccccacccaggagtgcctcagccctgccaagaagccatactcctccctggcatctctctgccccttgagcctgngnatatccctctgtctacagagacccaccaagctgaggt

SEQ ID NO: 19 - DNA, 341 bp, Homo sapiens
  misc_feature (275): n equals a,t,g, or c
  misc_feature (310): n equals a,t,g, or c
ggacgctgccggaccggccgaattcccggtcgcccacgcgtccgtttgtaattaawacaggatcagagaagtgacttgctcacagtcacaaagcttgtaagtggtagagagccaggaattgagtgtgagctttccttgtttagttttgttcgagtggctaaatcaacttgtctgtggttgttaagaaaaacagtagtcccagctggtcacggtgctcagcctgtaatcccagcactttgggaggccaaggcgggcagatcgcttgaggcaggagntcgagaccagcctggccaacatggtgaaacacagnctctaccaaaaatacaaaaattagctgggtg

SEQ ID NO: 20 - DNA, 483 bp, Homo sapiens
  misc_feature (355): n equals a,t,g, or c
  misc_feature (372): n equals a,t,g, or c
  misc_feature (395): n equals a,t,g, or c
  misc_feature (420): n equals a,t,g, or c
ggaaagcagggccctccacatgtgaaacaagataggtggtgcttgggagttgggtcaagattgatagctttctagctggtgcagtgggattgcacctgtaatctcagcactttgggagcctaatgcaggatagcttgagctcaggagttaagagacagcagggcaacatagggagatcccgtctctacaaaaaaaacaaaaaaattagccaggtgtggtggtgtgcatctgtgctcccaactactcagcctcccaagtagctgggattacaggcgcctgccaccatgcccagctaatttttgcatttttagtagagacgaggtttcaccacattggccaggctggtgtcgaaaanctggaccttagggaaancaacttgcttaagcttccaaagngctggaattacaggcgtgaaccatngggcctggccttctttttttttaaaaaatgggagacaggggccttggtatattgacaggctgg

SEQ ID NO: 21 - DNA, 456 bp, Homo sapiens
  misc_feature (452): n equals a,t,g, or c
  misc_feature (454): n equals a,t,g, or c
  misc_feature (455): n equals a,t,g, or c
gcccacgcgtccgcagacattakaattaccaatgtaaactttatatctaaaaccaaaatcaattacaaaggatcattattttccaaagtagatacttttttttagtgctgttcagtttttctgaagcttatctttgttcacaaggattgttagcacttccaccaaatcagtgtttagaaaccttaaataatttaacgtctgacttgccagtacattattagagaaacaattccaagaccaaaacatgttgaataagcaggagatatacaccaatttgattttaaaatggacagctttcctgtctctggctctctctcatgttgccttaaacacacatatgctgaagaaatcatatacagatacttgcatgcatttaataaactatccaataagtggtgcttttaataaattctgaatacaatcamwraaaaaaaaaaagggscgcccgtttnanng

SEQ ID NO: 22 - DNA, 791 bp, Homo sapiens
  misc_feature (744): n equals a,t,g, or c
  misc_feature (774): n equals a,t,g, or c
  misc_feature (776): n equals a,t,g, or c
  misc_feature (784): n equals a,t,g, or c
gtacgcctgcaggtaccggtccggaattcccgggtcgacccacgcgtccgttagctttcactcttatatctgtgattcattctgagttttcttgtatagtttaaagtcagagtgggtgtttgtttgcttattaatatatttatagatatttctaattctttctagcaccatttattaaaaagtctctttttttacccattgaattattttgtttaaattgttatgtctaaaatcaaattaccaaatacacattgtctattttgaactatttattctgtttcattgatttttatgtgttcctttacacctatatcattgtcttaattactgtagatttgttggaaatatgggagtcaaatttaaggatttcaattttgtccttttatcaagttgttttggctgttctaggtcctttgcatttccctataacatttggaattaggttgtcaatatttccccagaataaagcctgctgggattttgarcaggattgyatggaatctataaatcaatttagtgagaattaataacatattaagtactctaattgatgaacatagtatcatcttccatttatttagtctttgacttctcggaaatgttttatagttttcagtgtgtaggtcttgaagtttgtaaaattctaagtgttttatggttttgactgtaattgtaaatacctcccattgttcattgttagtacatagaaataaaataaattttgtattaaaaaaaaaaaaaaanggggggccgttttaaaggaccaagtttacnancgcgggcnttcgacg

SEQ ID NO: 23 - DNA, 700 bp, Homo sapiens
  misc_feature (624): n equals a,t,g, or c
  misc_feature (628): n equals a,t,g, or c
  misc_feature (653): n equals a,t,g, or c
  misc_feature (691): n equals a,t,g, or c
ggtykggcggcgtgaacttgttcgccaacgacggcagcttcctggagctgttcaagcggaagatggaggaggagcagcggcagcggcaggaggagccgcccccgggtccgcagcgacccgaccagtcggccgccgccgctggccccggggatccgaagaggaagggcggtccgggctccacacttagcttcgtgggcaaacgcagaggcgggaacaaactagccctcaagacgggaatagtagccaagaagcagaagacggaggatgaggtattaacaagtaaaggtgacgcgtgggccaagtacatggcagaagtgaaaaagtacaaagctcaccagtgcggtgacgatgataaaactcggcccctggtgaaatgacgcccctcccccacctgcccatggcctgggactctctgcgatgtacataactatttaatgcagcggcagcggcgacagccttccctgagaggacttaaaagcagaaggaaaccgagatgcttcccgcarcccgtggacgattctycaggactctttttttaccttgagcacttgcctcgtgagacttyatagaacagtggkttactgtccccccyttytamcttcttattctctctggctcttctgncttnctcttctaaccttctccttccttanccatacttytggaagtaaagaacttgacttaatgccgnaaaaaaaaa

SEQ ID NO: 24 - DNA, 115 bp, Homo sapiens
  misc_feature (10): n equals a,t,g, or c
gcttttgttnctttaatttttaaaaattacattcttctgatgtaacatgtgatacatacaaaagaatatagtttaatatgtattgaaataaaacacaataaaattaaaaaaaaaa

SEQ ID NO: 25 - DNA, 747 bp, Homo sapiens
  misc_feature (558): n equals a,t,g, or c
  misc_feature (618): n equals a,t,g, or c
  misc_feature (638): n equals a,t,g, or c
  misc_feature (649): n equals a,t,g, or c
  misc_feature (675): n equals a,t,g, or c
  misc_feature (688): n equals a,t,g, or c
  misc_feature (706): n equals a,t,g, or c
ctcccggaattcccgggtcgacccactcgtccgatttactywaattagggcattaaatatcatgtacttcatagtttgagactgttcactcaaatagggcagagtactattctatctagatgtgtaagtgttttttttaaaatcacatggaacggttttttttatactaaaaagtggagggagatttgtttaaacaagtatttctaaaagaaatatgtacatagttctggaaattatttgtggtaaggaaatattctttactccagttgcatttctcagacaataaagtggtgcatccatgctaccttctactttgtcaacaaagatgctatttaccctttacatttttgtatcataatagattttaaaaatctaatgttctttattgcaagacattcttttgttaacaggtttgtttctttttaatgttttacctaaaatttgacatgcttacaggacaggtttgcctcttactttatttaacattgtagaaatgtaattaataaacaatgctcactacacagtttagaaatagacgttctcatttatattatcttncaaatttgatcagttagcaaaacttaatacaccaattaaaatatttctacatatgaaaangttaccaattaaaattttanaacttggtttngatgggaatattgtcccaaaatgggnacactttgctaanctaagaaccgccttaccnaattccggaataaaaggctttgaggatggaaaaaaaaaaaa

SEQ ID NO: 26 - DNA, 352 bp, Homo sapiens
  misc_feature (351): n equals a,t,g, or c
  misc_feature (352): n equals a,t,g, or c
cttcacagagcaggattaagctatgaagcccgtcatgttgtatcaccagaacaaatagccacaagtgacaaaatgcagcatttcaaaagaactggcacaggaacacctgttaaacgagttagaaaagctatagagaagtctgaaaccacttctgaacacacttgtcagctctgtggtggttggtttgatactaaaattggattatcaaatcatgttagaggccacttgaaaagacttggaaagacgaaatgggatgctcacaaatctccaatctgtgttctgaatgagatgatgcaaaatgaagaaaaatatgaaaaaatcttaaaggcattgaacagtcgtcgtattatnn

SEQ ID NO: 27 - DNA, 358 bp, Homo sapiens
  misc_feature (120): n equals a,t,g, or c
  misc_feature (159): n equals a,t,g, or c
tcgacccacgcgtccgcatgaagtcctaatagtgtgtaaacatgtccatgaaaaagaattgctgagttaaatcaggttgcctgtttcttttcccagtttttccctatgtacttgtttgangtctgctggttgggttggtggtcagtggtgataaccagncagacaggtaggagcagttgctgagggcttaacactttgcgggagggagcactgagaaactccaccctctggcttagtttgttctagggactgggtgacagcggcattcttcaggcttggtccagtgatcagagagacaatcccgtgggwtcttggtgtccctcttgctatgaatgaggagaagggtgggggacacaca

SEQ ID NO: 28 - DNA, 384 bp, Homo sapiens
  misc_feature (322): n equals a,t,g, or c
  misc_feature (343): n equals a,t,g, or c
  misc_feature (348): n equals a,t,g, or c
tcgacccacgcgtccgtctggctgaatgaatgggagcttctagccattgaataagaggcagtagccaatgtttcttattctgaatggtccaggttgacttttataagagaaacactcagccttttaattgctgaaggtctggcccatagactaagattgcacattcttagtctaggttacacttgaactagactgcacccactgacgatatattcagttcaggtgttaactcacttggattagcatctggcctgtcctatctggaatataggttgagacgtgtattggaatctctggactagtcagaatacggtcttagttntattctccaatactggggganttttnacttgtagaaactggaaggcttcggaagggggatgg

SEQ ID NO: 29 - DNA, 493 bp, Homo sapiens
tcaaaattacatgttttattttcatgtttgtaaaacgaagagcttttttctggatggttttcttatcagcttttcacacaacagtcaagtaaacctcgtggcactagccagaaatcgtkgcaactttggaacttccaagacawtctggcctctatcaatgggcagacagcgaccytcattcaaaatgaagctgctagtcagtcacattcgacattcattatcttcactggctactcgtccacactcagaacgctgttcactgttaaaagtgtcaggttttaaccaagcgattttccattaaatattctcccagatgttctggaagttttttcgtgtatctttgcatcttcagagctgctccactgtgccacttaagacagcgccattgttctgcgggaaatcggtatttaagcattctcgcagaaatgtcacactccaaggcgtttttccacacaaaacccttccccttcattaatccgaattgcacacaacg

SEQ ID NO: 30 - DNA, 107 bp, Homo sapiens
taaagagcaatctgacagttcttagttctatatcaktgtgcttcatgaccatcaagatccacttttggatgtgtactggaaaaaaaaaaaaaaaaaaaaaagggggg

SEQ ID NO: 31 - DNA, 364 bp, Homo sapiens
  misc_feature (331): n equals a,t,g, or c
  misc_feature (337): n equals a,t,g, or c
atcgacccacgcgtccgggatcagtcatgcttaaaggctgaacgtttagcctgagatcaatagaaagctttcatgaatgtaaagcaggggagagttaatgttcagcagcctagctttttagatcactcctgttccagaggagaagagtctggaggccaacagagaagggtacaggtaaaatgtaaagatggtggctgggtgtggtggctcatgcctgttgtattcctagcactttggggaggctgaagtgggaggattgcttgagcccagggagtttggataccagcctaggcaacataggaagaccccatctctacaaaaaaaaaaattnaaattnagccggcctggtgggcactgcttaagt

SEQ ID NO: 32 - DNA, 418 bp, Homo sapiens
  misc_feature (367): n equals a,t,g, or c
  misc_feature (377): n equals a,t,g, or c
  misc_feature (388): n equals a,t,g, or c
  misc_feature (415): n equals a,t,g, or c
gggtcgacccacgcgtccgggtgcctgctaccacatccagctaatttttgtatttttagtagagatgggttttcaccatgttggacaggctggtctcgaactcctgacctcaggtgatccacccaccttggcctcccaaagtgctgggattacaggcatgagccactgtgcccagcccaacagagtcatttttataaaggaaaccccccctccctctacccacaaacttctgtgttttacacatscaagtgagttagaggaattaggcatttctttgcttgagttcattcactgttaatcttccaaatgtgtcaccttgaagaagctaaggagaggcggagtctcaggcaccggaaatgcggttgcnggtcagttangccccaacaantcattgacaaccagaggaaaagtgccnggc

SEQ ID NO: 33 - DNA, 217 bp, Homo sapiens
  misc_feature (217): n equals a,t,g, or c
tcgacccacgcgtccgtgtgagtccactgagctggcgtgtacctaaaatgaacaatccttctgtactctcatatcagtctctccggtcctcagtttcctgcaacatttttggtgaccacaaaaggaccagagacagcaggtttactgtttcctttggctctgggcgctggagccctgggcctcaggagacctgtgaccccaggtaccactggggggn

SEQ ID NO: 34 - DNA, 423 bp, Homo sapiens
  misc_feature (394): n equals a,t,g, or c
  misc_feature (414): n equals a,t,g, or c
  misc_feature (416): n equals a,t,g, or c
  misc_feature (418): n equals a,t,g, or c
gggtcgacccacgcgtccgcccacgctccgaagccagataattagaaggaaaacaaggagagtagatcattatagaaactaaaggaatgacaggggaaaggcatgtcaaatgatgctaagaattcatgttaaatgagggctcaaaagtgscgggatttggcaatgtatagattatccataacatttcagagagctgtttggagagttaagaagtccaaggcagaagtctgatgtgagtggacttgctgcttaagtgaacatggaaccatcacccaactaactggcattttttccattcccaaaatgaatatttgctttctggttgataaaaatgtacttttaattagagaagaatgaggaaatatgggagacaaaagaagacaaataatggatncccattttcccaaccatgtncncncatat

SEQ ID NO: 35 - DNA, 374 bp, Homo sapiens
  misc_feature (348): n equals a,t,g, or c
  misc_feature (369): n equals a,t,g, or c
  misc_feature (372): n equals a,t,g, or c
gggtcgacccacgcgtccgagtgattctcctgcctcagcctcccaagtagctgggactacggacgcacactaccacgcctggctgacgtttgtgtttatagtagagatgggttttcaccatgttggctaggctggtttcaaactcctgacctcatgatccgcctgtgttggcctcccaaagtaggactctcttaagattggattaattctgctactttgctgccttagggccatttaggtaaaatgggttcttggcaatgaagtttcctttctttagctgagtgctgcaaagatgtctgatccctatcaaacaggtatttttccccccataggcttactgtgttcccnctctgtttacacctctgaatnttnca

SEQ ID NO: 36 - DNA, 360 bp, Homo sapiens
  misc_feature (312): n equals a,t,g, or c
  misc_feature (340): n equals a,t,g, or c
gggtcgacccacgcgtccgaaaagaaaactctcctttgaattaaggtaatccttcttgaaaggcttgtttaaaatgtttccttgttacctgggagagagcaggaagcactgggaaatggcacgtcactggtgcctcgtgccatttcgtgcctttccctgtcttgcctcagccttgcactgtgggaatgcaaaagagtagaagaaactccaacgtgaaaattgtcgacaaacaatgcagagaatcttcggtggcattaaacattaaaattaaagacacatggtcttaaattcagctgatatacttgacacctncagatatactcttggtgccaaaagggangttaagcaaaatttgagggg

SEQ ID NO: 37 - DNA, 277 bp, Homo sapiens
  misc_feature (265): n equals a,t,g, or c
gggtcgacccacgcgtccgtaaatttctctgctcattcatttattctgcaaacatttattgaccagttacaatgatccatgcaccatgctagagactagggctaaccaaaatgaataaattcgtgccctgttttcaaagaactcagaggcaggtaaaaggtccagcttgcagataaaagattacaaattcagtatcgtaagtgccatcctggaaggagtacaggagatgtttttgtccgtgtaatcattcattcaacaatttttntttttttggaaa

SEQ ID NO: 38 - DNA, 319 bp, Homo sapiens
  misc_feature (287): n equals a,t,g, or c
  misc_feature (300): n equals a,t,g, or c
  misc_feature (312): n equals a,t,g, or c
accacgcctggcccagataactcttgcctgcctgatttttttataatgatgcactttgttttgttaaaaatttataaatttaaagacaaaatatgcaaaaatgtgccctggtctcagaaataacacagcacattcgagtgaagttgttggcagttccgtgtgttttggggtgattcatttttttcataggttgttggggccgtgcatccattcgtgttctgagcacactccatggtacctgatgactcgaatggatcctgttcaagcccctgggttacccaaagaantatacttctggcntgctggttggtncagagaa

SEQ ID NO: 39 - DNA, 1468 bp, Homo sapiens
  misc_feature (1388): n equals a,t,g, or c
  misc_feature (1406): n equals a,t,g, or c
  misc_feature (1424): n equals a,t,g, or c
  misc_feature (1453): n equals a,t,g, or c
gggtcgacccacgcgtccgcccacgctccgaaagaaataaccccagcgaggtactcttcagggacacaggtctagtacaagagaactcttgacggctactaagttcagccagtcttaaaaaactgtgctgtttctacaaaactttaactacagtagtttataaggatgccaacgaaagctgagggtgtagagcaaaatagttctaagcttcagttaaacttctttagcattgatatgaaccatggacaagtatattctgctgccacaaagactgtaaagtgcttcatttcaacagctgaggcaagccaagtgatcattaataaagcttttcttggttccttcagtggtgttggtagtaaaatggaaggtgtcttgctgcaggtaactaatgaagaagtggtcaaccacagagtcttcaagaaataagaaattctgtaccatctgaaagtagttcttgttggtgccttcatttaaaaagcactctttaaaataaaagggaaatgttttctgataaaacaaacatttagttgaggttcttgatataaaacaattacaaaatgagtgttgtttgtaaaacagtaacatcaaattggctagagagataaatgtatcatgttttaaattaggttttgtgagtagacagattacaattctattttaaatataaagtttataaaataaatactttttgtatccaaatacttggtgtaatgtttacacataaaatgtgtgaatcttgttctataaatatttggttgtctaaaagatcaccatcccctaaatttttaaaagcagtttcacaaagctatgcatattttaatattaacaggtaaatgagaagagcattgtggacattattggctgtccccaataaaatgctgttcattatgcactgtatattcagcgtttgagtactcctaaagtttctggctttacttttacgtttagcaatactggtggcattttgaaaatcatggattttaaaggttaaccggctggagtggtccagattaagtggctttgcagaagcactgaggtttacaatatgtgctagattgtcaaatgtcaattagttttattgtggtttacactgagtaaatgaatatcagtgttgctttttaaatgtgtttatttggacatttatytgaattaagaaaaccaaaaagaccaggttaatttgtttctatgataatttgttttggttttgataatgtgaggtatctaacaggtaagtcaaatttaacagcaggtaacacatagaaagcagctttctgtttgaaatagctgagttcgtcaattaaagacgtacaaatatcccaactttaagaaaattttgaaggtttaaaaatgtgtggatgtcaaagacgttgaactttgaaatacatcangttgatatgcataacctnaaaataccaactcctatncagccaagggtcaagggaatattacacanatagggggagaatta

SEQ ID NO: 40 - DNA, 422 bp, Homo sapiens
  misc_feature (332): n equals a,t,g, or c
  misc_feature (398): n equals a,t,g, or c
  misc_feature (404): n equals a,t,g, or c
  misc_feature (406): n equals a,t,g, or c
gggtcgacccacgcgtccgcaaagtgctgggattataggtgtgaacaccgcacctaggcaatatactgcctcttaaggacttttctaactggattgagatgaaggaagtgttgattcaaaaatgaggccagatcgtgtgcctagaccgtgtctgtttgacaacattcaggaggggtaggtcatgattctggatttaccgtgtttgaggtggtagaggcttttcaatgagatgtgtctagtagatgatgagaaacctgagattggagcccaggttaggaatagagatactggtttagagtccaggctgagaatatcagaagagttgttttganaatggcaaaggccggagagtataaaggaaagccgagaagccgaagattacaccccagagaaatccnggggcngntgaaaggccttgatgt

SEQ ID NO: 41 - DNA, 642 bp, Homo sapiens
acccacgcgtccgccagtatctgtgaaatgatgttttatctgtgtgtcaggatgagaaacggcagtcatyccaccaagtgttggaaactggttagcctggagacaagggtttctggggccacagctcagggatgtgtatttaattacaggatccccagaaactcctctctaggctgccacagcaacattttttctgggcttwggagccatacstgaactgtttcctccaaggcgggaactccagagagcctgccaatctggagcaagctggggcttctgctttggccagacckgggccaccatgagacttgaaggcttctagctgtcctacgacacgagccacggtgccctgcctytccccgctcatagaagcctggtccctctgtctagcccagttcccatctagcatccgtcttctgggcctgaagccctaaatggaccacagcctgcacaggaatcaactgtaggctcaaagggaggcggtgagtaaggtcagagcctgctccaagcccaagaacaaaagttgtgttatgggtggaggctagtcccccagatctagccctgccgtctttgccctttaatgaccattgttttctttctctaaaatgtcttgtaataggtgataatgttgttgattcaaat

SEQ ID NO: 42 - DNA, 546 bp, Homo sapiens
ggaaagctggtacgcctgcaggtaccggtccggaattcccgggtcgacccacgcgtccgctaaatgctatttatctctgagccgtccccgtcctccgtgcagagcaagttgaggtcattccttcttttcttctccgatcttttttcttggcttctgaccaaaaaccaagctctaccccatccccatcccagacctgcaggagacgagcgagcgggaaggcgccgggcccgggactgtccgttctcggggccagagctgctgggggaccgagtttgtacattttccattttggaattttgagttccaattgttgtaaaacttaatttctccccagtttttatatatatattttttagagttccgtttttatttattaaaaacaaaagccccagccctgccgaggcctgggcggcgtcctcagtcgggtggtcccggggcctttgcggtcccgcccggctgagacgctcgccccgacgcatggacccgagaggcgacgacacgagtgaataaagtgcacatggaccctgaaaaaaaaaaaaaaaaaaa

SEQ ID NO: 43 - DNA, 1615 bp, Homo sapiens
  misc_feature (2): n equals a,t,g, or c
  misc_feature (14): n equals a,t,g, or c
  misc_feature (1580): n equals a,t,g, or c
  misc_feature (1581): n equals a,t,g, or c
  misc_feature (1582): n equals a,t,g, or c
  misc_feature (1583): n equals a,t,g, or c
  misc_feature (1584): n equals a,t,g, or c
gngcgacgcgttgncttcccaacgtcgccccggtttgacgcacacggcaccaaactgtttgatttaattttggatgagatcgttcttgcagcaagatgttaataagacaaaatctagccttagattgtaagcaaaagaaatcaaggtcaagatctggaagcaagaagaaaatgctaacattacctcatggtgctgacgaggtttacattctccgatgcaggttttgtggcctagtctttcgaggacccttgtctgttcaggaagactggattaagcacttacaacgacatattgtaaacgctaatcttccacggactggagctggcatggtggaagtcacgtcactacttaaaaagcctgcctccattacagaaacttcattttctctactaatggccgaagcagcttcatagaaccaggaaaccttttaaatagccagtttgaattggatgtaaatttgaaattctttttttttaagccacattaaattatctgtttataaatactaaagcaggaaaatggggggaaagtgaattacagtgacatcagagcaaattgaatacttaaaacagtaagtagtctatatattttatatagggtggaaratgtgtttttaaggyttatgaagttttgttggttaactgtgttcactcagtaaaagagcagtacatgtaagcagccattaataaactgttgcacatggatacttatagacagacttattggacaattatgttttttgcagtgttaccagaatcaaggctctgtttattccccacaagacttgcatagaaaaataagatattatattttgtttgtatgtatttagtgttttgtataataccaagaaccgctgactaaatttactcaaattagggcattaaatatcatgtacttcatagtttgagactgttcactcaaatagggcagagtactattctatctagatgtgtaagtgttttttttaaaatcacatggaacggttttttttatactaaaaagtggagggagatttgtttaaacaagtatttctaaaagaaatatgtacatagttctggaaattatttgtggtaaggaaatattctttactccagttgcatttctcagacaataaagtggtgcatccatgctacctcctactttgtcaacaaagatgctatttaccctttacatttttgtatcataatagattttaaaaatctaatgttctttattgcaagacattcttttgttaacaggtttgtttctttttaatgttttacctaaaatttgacatgcttacaggacaggtttgcctcttactttatttaacattgtagaaatgtaattaataaacaatgctcactacacagtttagaatagacgttctcatttatattatcttccaaatttgatcagttagcaaaacttaatacaccaattaaaatatttctacatatgagaatgkttacaatttaaattttagaacttggtttggatgtgattatatgtacsaaaatcgtgtaacactatgctcatgctaagaaccgacataacagaattactgaaataaatgtgctgtgaggaatggaaaaaaaaannnnnaaaaaaaaaaaggggggcccttttaaaggaa

SEQ ID NO: 44 - DNA, 735 bp, Homo sapiens
  misc_feature (616): n equals a,t,g, or c
  misc_feature (718): n equals a,t,g, or c
ttgaagacctggaaaacatgttaaataaaaatgctttgccacagctgacctatgtcttctggcttgtaccccacaacatcttatctaatggagccagtcttggtgctctgtgttcacctggttcatctgaggagctgcatctaccctgcccatgccatagatcctgccctgtttgcttctcctgttgctgctagtggacatgagaaggacagaataacgggctcccagattcacaagccccaccaagaggatcaccccaggaatgcttggaggctgaggagttcactgaggctactgcatcttgagactcaggatgaagacccagcttggggctgtcaaaggttttttgcatgtctgacacccatgactccacctggaccttatggctccacccagaagcaattcagcccaacaggaggacagcttcaacccattacgatttcatctctgccccaaccactcagcagcaagcacctgttacctgtccayccccaccccttcccccaaactgcctttgaaaaatccctaacctatgagctttgaataagatgagtacgaacttcatcgcccatgtggcgtggccggcctcgtgtctattaaattctttttctactanaaaaaaaaaaaaaaaaaaaaaaaaaaaaaaaaaaaaaaaaaaaaaaaaaaaaaaaaaaaaaaaaaaaaaaaaaaaaaaaaaaaaaaaaaaaaaaaaaaaaanggggggccgttttaaag

SEQ ID NO: 45 - DNA, 609 bp, Homo sapiens
  misc_feature (485): n equals a,t,g, or c
  misc_feature (572): n equals a,t,g, or c
  misc_feature (604): n equals a,t,g, or c
  misc_feature (608): n equals a,t,g, or c
gaggaactctctttagggaaatttggcccgcctgcacgtaccggtccggaattcccgggtcgacccacgcgtccgctcctcatgacagaatgagtatgtgtaaaataatgaataagtttaacatggacctatttatactttgaagtaatccttacagattctttgctgatattctaaaatgcatgaatttctgtgcattcatgcaaagctcaagattccaaactcagcattcttctgwttgcatatgaccttgcaagtctgcattatatatgtccctgacaatattcttggtgattcctatagttattttttaaactatgttaaaaattaaggacacttagtaaagcaattgaaaatgcaaagctaaatatagcagagaacctacttcaaggtggtgagagtacatattcaaggctctgatttacacttctatttcacatggtagacctatttatcttaagtaacaactaattgcaatatattanaggtcactttatgcatcgatcttatagcctcacaatccaaatatttatattatttaaaataaagcacttttttctgtattttcctgntgaaatacatagtgccacctttatttgcgcanaaana

SEQ ID NO: 46 - DNA, 338 bp, Homo sapiens
  misc_feature (252): n equals a,t,g, or c
  misc_feature (279): n equals a,t,g, or c
  misc_feature (286): n equals a,t,g, or c
ctgtccacctcatgatggaccatcctatgtgtaccttaaaaatgaaaatgaataataaattttcataaaagaaagtgctaaaatcaaagtggataaagtgattaacatggacagataaaaaattcagtcaccaagcacttgtacaaccactcacaagttgaagttgcagcaaataatttagatattgctggtcgaatgacatgattctagctgggctgaagctactctccatggagttctctgggtaccttncatgacacagtgataatgagccataantgctttncttgaagaattcttaagaatcatgaccatgctcctttagggaaatttacttg

SEQ ID NO: 47 - DNA, 179 bp, Homo sapiens
ccaacgacctcatttagcctatttacctccccaaaggccttggtctccacatatcatcagattgtgggttaaggcttcaacatatgacatttaattcagctcgtaccagagggtgtttaagcattttcccattgaaatgtattcccatctttccaggtgtccatctctcatttgctttt

SEQ ID NO: 48 - DNA, 446 bp, Homo sapiens
  misc_feature (72): n equals a,t,g, or c
  misc_feature (73): n equals a,t,g, or c
  misc_feature (394): n equals a,t,g, or c
  misc_feature (404): n equals a,t,g, or c
taggttttaggtgacacgccccgcaggtaccggtccggaattcccgggtcgacccacgcgtccggttcaggnnaatcttgacagtgaatgtgtctcattacattgaataacagctacaggatgttcgagagctgttctggcttttctggattctgtgcttcaccaatagaggaatcccatggagcattaattagttcttgcaattccagaaccatgactgatgggttggtgacattcagggatgtggccatcgacttctctcaggaggagtggraatgcctggaccctgctcagagggacttgtacgtggatgtaatgttggagaactatagtaacttggtgtcactggatttggagtcaaaaacatatgagaccaaaaaaatattttcagaanatgatatttntgaaataaatttttcccagtggaaggacaaaagtaaaaccct

SEQ ID NO: 49 - DNA, 528 bp, Homo sapiens
  misc_feature (19): n equals a,t,g, or c
  misc_feature (84): n equals a,t,g, or c
gcttcgtactggaaagacncactatagggaatgctggtacgcctgcaggtaccggtccggaattcccgggtcgacccacgcgtncggatttaataatttatttaacaatacttgtttaaaatgtttgtcacctgttctagaatataaacttcgtgaagacaaggaccatgtctagcatgggagaaggcacgttgccttgtgtgtaagaggtgattagaaatatttatggatagataattgaatatgtggtatcttcaggaaggttcagagaacaccatgtttcttactttagtatcattctagacctgtagattagcaataagtaatcttactgatggaggaacatagaaacttctcactggaccatggcttaaaaactagagtcttgagtctggttttgtgattctcactacagcccttagtcctatcatgagaatattttccacttttttcttttctttcttttttagtaaaaatatgtaagaggagcttatagaaagttttgtgaacttcagcaataaaaaaaaa

SEQ ID NO: 50 - DNA, 405 bp, Homo sapiens
cagaaatagatgaagagcacgtggaggatgacgggctgtctttggacattcaggaaagtgagtacatgtgcaatgaagagacggagatcaaagaggcgcagagctaccagaactccccagtcagctctgcgactaaccaggacgccggctacgggtcgcccttcagtgagagcagcgaccagctagcccatttcaaaggctcttcctctcgagaagagaaggaggatccgcagtgtcccgacagygtctcgtacccccaggacagcctggcacagatcaaagctgtgtatgcaaacttgttctccgagtcctgctggtcagcttagctctggatttaaagaagtcgggttccaccaccagcaccaacgatgccagccagaaggagagctccgcccccacccccac

SEQ ID NO: 51 - DNA, 618 bp, Homo sapiens
  misc_feature (29): n equals a,t,g, or c
  misc_feature (46): n equals a,t,g, or c
  misc_feature (111): n equals a,t,g, or c
ggtaaaaaccttggggccgtggataccanggtgccggtgagcccanttcccttttcagttgtcacctcagcacccataacatcacgaaagaacatcattaatgcaaacctnctcactaagccttcagacccaaagtggctttcctgatggactctgcctgtctgtcctacaagtggagtcagattcaaagtagaaatgtatccatccttgggaaagaaaataggaagtcttcccccactgtaggagtatataaaaatgtctcccggttgcttaattcccaacactcaatttccttcttctaaacacatttataaggagcaagagatggtgcacttattatgaattaatattaagcaatcactaaaagaaaggaatattctcttcctttcaatcagaaaccctgatatgtaagttgtgcaattaatgctaaagcatataaagtctttaagctgataagtatctgtaatcaaataatgaaaaaaaaagcagttaaatgaacacactattcagggtcaaatatgttcagcaaaaagccgtagcgtggtctttgatcatggttagattcacagtgatatcaaacagttggttctcatgtaacagctaaatgtttgcagtttt

SEQ ID NO: 52 - DNA, 586 bp, Homo sapiens
  misc_feature (565): n equals a,t,g, or c
tttctgttttttttcctgtttgatagctgtcagttatagtgattggtatttaatacaaaaaaaaccaaagatatgaaaattgttctatattttamtckgcaaattgctccattaggcagatttaattatttgtggatttacttatggtgcttccagatatcttgtacctcttaatgtgaccatcagaaaacttgactgagaaacatttgtactatacaaaatacaaaatgctttcagtatattattgcaagtgcttcttaaaaacatatagtattgttaaatgtgtactttttaatgttgtcttgtttaaattggaaaattaaccaaatgttatccatttaaacatgctttataacatattaaatgtgagtgcttaataagtacttttaatgatactggtacgggtgttggaacccagtcctagtcaagagtcyaaatcttcatctctgtttttcagacaaatgtagtaggacattcyttaggatgkacytggcattccytgaggaattctcckggtgaaaagatcmacttacygraaagaagccyccytagtattccaaatccngattacatccagcggcctaag

SEQ ID NO: 53 - DNA, 469 bp, Homo sapiens
  misc_feature (19): n equals a,t,g, or c
  misc_feature (31): n equals a,t,g, or c
  misc_feature (55): n equals a,t,g, or c
cttgcccaatgagataagnctttttcccagnacttcacacttactcaaaaaaagnacattggaaaacgcctattttaaatatgttcaaagaaccaaaggtaaacaacgtctcaccaaatagagaaaatcaataatgagatagaaattacggaaggaaaagccaaaaaggaatgaacagattctcagagacctgtgggacactgtcagatgtaccaacatagggcatgatgaaagtctcatgtcaaccataattttcacccatagccatacatgcccaagagaattgaaaacatgtartacttgaatgtgaatgttcatagtggcataatagctaaaaaaaaagracccagatatccatcatctgatgatgagtgaacagtgtggtttatgcatacagtggactggattcaggcataaaaaggaatgaagtattgatacagactacaacgtgaatggatgagccttaaga

SEQ ID NO: 54 - DNA, 443 bp, Homo sapiens
  misc_feature (21): n equals a,t,g, or c
gggtcgacccacgcgtccganagatgattattccatacytaaamccaattcaaaataaaataaaycctsaatactycttattcccyggggtagtaattttaattagattctattgattcattattttctcctgtgtgcctttatttgggaaatactgttagtttaccttgctatcgagtctctttccctaacaagaaaatgtcagccttacgagtcaggaaagcktktrctttcactatcacatatgaagaatgaactaaacacctaacttggaaagtaaaacttaaatgagggattcaggacatttcccaaggggtcatctgaccaatttaagagttggtatgatgtgcctaaaatagcaaattaactcttctacttataataaaggtgcmgatgtactgattagacatgctgacatgtacatataaaatatgcctaaacca

SEQ ID NO: 55 - DNA, 318 bp, Homo sapiens
  misc_feature (243): n equals a,t,g, or c
  misc_feature (289): n equals a,t,g, or c
  misc_feature (306): n equals a,t,g, or c
actccgtctcaaaataaataaataaataaaaagtttgtgctgttaatttaatggggttgggagagtgaacaagttgttttcatcaaacaattctagagttttggagtggggtgcttaggaacstcatgttttctgacattgtgacttactccygttgagctgctcttcccgaagcactgaggcaggagtgctctccacccaacaaactgacctcccagttaacattccttagcaatgcgagtncaaagaagtgcttttaagtgtctctgattttttaacacatcactcnggcagtccagtgtctangctggaaatttc

SEQ ID NO: 56 - DNA, 335 bp, Homo sapiens
  misc_feature (245): n equals a,t,g, or c
  misc_feature (312): n equals a,t,g, or c
  misc_feature (335): n equals a,t,g, or c
gggtcgacccacgcgtccggtaccttagagatcatcttgctcacagtagatcattaatatcaataattaaagatgaagcttaatccaccatggtcatcagtcaggtggggcttattctaaatgcttaatgtgtcttaagctcatttccttgttcatatttgggttgctacttggctaaatcctttcaccttagtaccctaagccagtttcctggcttggatactatttgataatgctctgctcangaatgattatattgggtgagaaatggagccctggggttgtgtgttttggaacagtattcaagatcanagaaagttcttagtccaggttan

SEQ ID NO: 57 - DNA, 1034 bp, Homo sapiens
  misc_feature (732): n equals a,t,g, or c
gcccaactccggtgccacctgcaccacggaggggtgaccccagggtcagggtcagagcggcttctcagaattcagcttgccacctctccgcggaccctgccttcatctcgtgcctcctcagagccctctgcgggcgcatgaagggcctttttttttttttttttttttttttttggcacaggtggaccaacggggggtgtgactgtgggcaccgtgcgcggaggcggaggctcatctggttcccaccctccgtgccgctggatgccccaggattttctccaaccggggtcccggcttggagccctccttggtgcgagctttggctcagcaaatggggaaagcgggaatgggtctcgcccttgtggctgcctggtggaagcggcggttttgacacacgaatagtcgtggggagcagatccagagagggcgcatttgcaataataacgcttagttkatctctgccagaggggcgggaacaggccttcgcgctggtgtcttacatcagccaagcaaaccatgggcgcgattggagccaaccacctccagcggggttttgctccagacttaaggtgcacggaaaccggagcattcagcccttcatggatgcctcccgaaaacctcaccatgccagtgacacgactgcaaacggcgggtggcacatgccgggggcttgggatgggagggtttggaaacctcgctccaaggacgccctcagccaaggagcttcggctncttcctagaatttctagaagcacttttggagggaccgagggcttccggccgggcccagrggaatttgagcgcttgcccgggcaggcagaagcgcagcctgggagtggagaggctgctgggccacattccggcccagcttcccccgctaggccccagccctgccgcggcgccccaggaagcacctccgaaaacaaagcgctgtggtttcagcccaargttaaagtccaccgcgagcgtgttttttcccccctccagaatctaagagcgatagcgtttctccaaataaaccgccaataaatcaa

SEQ ID NO: 58 - DNA, 329 bp, Homo sapiens
  misc_feature (26): n equals a,t,g, or c
  misc_feature (265): n equals a,t,g, or c
  misc_feature (319): n equals a,t,g, or c
gggtcgacccacgcgtccgcccacgntccgtgatttcttcatctttagaaaacactaagacaatttgcctgaactgaatgtttaccagtttttattgctactcctcctcctctctccaaataaacaaaacaaataaatatccaagactgcaagattacttcatcttccacaggtttgcatgtacaggcatacctcggagatagtgtgcacttggttccagaccattgcaataaagtgaatactgcaataaaatgagtcacaccantttttttggtttcccagtgcaaagttatgtttacactgtattatagtgtattanggcgtgcaaa

SEQ ID NO: 59 - DNA, 407 bp, Homo sapiens
  misc_feature (407): n equals a,t,g, or c
tcgacccacgcgtccgcaagaaacatcacttggaaaagtgccacggtatgaggtcattcactgaaagaacaagctaagccctgcattcttagaagttcccgaaagcatcactgaawtacttattggttcatccaaawtccttgatatcactaagaaatggtctccttagcctccttatgctctgcttaataagacagaagagtgtgtaaagtgttttagaagtactcccatttgaaataatgtttttaagccaattgcattttgttattgaaagaggtatgtttcagataactggaaagttaatttatgtgaamaccaccctatctgcattactttatccccagcaatattatcytgckgtaagaacckkaaatttatattaaactcaggkkcgtgaaaaaaaaaan

SEQ ID NO: 60 - DNA, 605 bp, Homo sapiens
acccacgcgtccgaaaataataagaaaataagaaagttaatcactcatgtgggaaacgcctcagtggaaaccactkttaaagcttttggtgtgtttcttaacagtttattcccaggcattgaatttttgctttgttttgcctttcacataatgaacatgtaaaatgtgaagtaggatatgatgtaaaagttatcaataggatcaatcaaaaaaatcattttttagaaattctaaagtgaccagaatctccccstckccaacacaaaatcagtcctcccsrcctcccscatgtcttacacaggaaacggtgcttttaaatgtacatccagagtacaaacattgtgtatttctgcagatgttaagggaagctaaggagaaggagaagcagagactggcacagcagctcacgatggagagaaccgcgcactacgggatgctgtttgatgaatatcaaggcttgtcacacctggaagccctggaaattctgtccaatgaaagcgaaagcaaggtacttctgcactactcgtttgaaatggcatgcttagtcatgtgttgcttaaacatgaaagaaactggaaaatctgccattaaaagatctcattttt

SEQ ID NO: 61 - DNA, 425 bp, Homo sapiens
gggtcgacccacgcgtccgcccacgcgtccgctcttgatgcacgaataaatatctctacatctagcctttgttaaaaataaaaattaatattctacaaacacctacatatactagagaggggtgaaaactgcrgctaawtcctttataatactttcagatgattgcattaagcctttcatgttatgtggcattgttaatttttcctrgatacccatccacttaagggccagagaaatccttattcatttaactctggtgggcatttatgtaacatacccaaataaaaacgttattaaacagccacaatcgcattcagtcaacttggcactgaatgtagcttctaaaatcagttctctaccctacgaatggaatgttctaccaagaaagagaagcatcaccatgtcatcttgtgttctacaccact

SEQ ID NO: 62 - DNA, 677 bp, Homo sapiens
  misc_feature (12): n equals a,t,g, or c
tttttttttttntggacacaacatgatattaggctttatttgaatttaaaatcttgattccatccagggacattttttaccgaagcgtctcagagactggctcagggtatttcttgasaagactgtacagggcttctcatcatacacaaaccctccacagcccacgcgctccaacccacagcacctcctgcagtcctggagggaaaagggacagtaacatgaagtgtctgaagatccatttcacctcttttccatgtgaatcatgacgctttcaatgcatttcttgacaggattctattttgaaagaatgatgctcaatctgtaccttttatgcttcttgtttcttctccatcaataatatgtcagtcaactgcttgtcagagacacttagctgctgacaggtcctcataacctgactcaggtaaactgccaagagatgcttgcacaggatgctgtcactctttccgtagcactgagaatgcaaatgcaggacatgaacagtaatgacaagaagccaaacatgtgtatgttttactggaacttccaaggacctacaaagaaaggatagatgggatcagacctcagatgtgctggaaaaaccacctctttccctttttatttatgtagactcagagttgctctgcaaattgcaccgagacggacgcgtgggtcgaccc

SEQ ID NO: 63 - DNA, 409 bp, Homo sapiens
  misc_feature (219): n equals a,t,g, or c
  misc_feature (372): n equals a,t,g, or c
  misc_feature (384): n equals a,t,g, or c
  misc_feature (402): n equals a,t,g, or c
gggtcgacccacgcgtccgggctgaagtgggaggatcaccccagctggggaagactctgtctttaaaaaaataacaaataaaaaaaactcctcttcactcatgtttgtatcacctcctcccctctttgggcctcttctcttcattctggccaactgccaattttgtgtcacaggattcttcacccagtccttcccatcactggctctgttccaccctgnaagttataatgtccacatttctggaggaaagaggtamtaatgtggatgttggccccacactttctgcccamcttgtggttttgtttgtttatttatttgtcagagtcttgctctgtctcccrggtgggagtgcatgagcggagatcgtaccanggcactccggcngggtggacagatggaganttgtcct

SEQ ID NO: 64 - DNA, 875 bp, Homo sapiens
  misc_feature (55): n equals a,t,g, or c
ggcacgagaacattttcaggccccactcagacctgagtcagcgctcagtgggagngaccccgcacgtcacgttgtgacagctcttcaggtgttaggccggttgtcccttcgcgtccttcatagaatctgatccaggaccacacgttgcatttaattggcgtgctctttagtttcctttcttctgtacccccattttcaaggggtgcaggcaagttatcttgagaatgttcgtcaatgtgatgtcgcagccccaccgttgggagtgtacagatggcaacatattttcacacagtgtgtttatgaatgttcagagcaagccttcataatggccaaaaacgaaataattcacagtacatgaactgctagtaaatactatagattaagagatatttagaatttaaaarggaataaatgatatctactacactgtgtatgaacattgaaamcactgtgctaagtgaacgaagcargacacmagactacgtattattatatgtaattccactcggataaactgtcctttgaaaggcacatttagagacacagagcgggtcaggggctgcacagggctggaggtggcagcgggagcttcggagaagtggagcgacccaaaaccggattgtgggggtcgctgcggaactctgtaaatttgctaaaatcattggattgtacatttaaagggataatcttatagtaagtcaagtacacctcaattaagctgttcttaaaaattgactataaactaacacagcatctcagttagtgccctcagaactggagttgggacccagtagagaggtggaaagaagtgaggcctaagtgcagtgagtttgtttcaaataggtcaatcatccacgccgagccctatgcagtct

SEQ ID NO: 65 - DNA, 229 bp, Homo sapiens
  misc_feature (28): n equals a,t,g, or c
tggggctttgccagaaagggacttcacnactgtcataacattttaatctctccaggcctgggacaaggtggaaacctacaggttcccaaggagattgttttcatcattagcatttcagccaaagccttaatgctgcaaaaagaaagcataatgtggagcaagagttcctgctttggcctattctgactctagctctccagggctctgatgaagtccattgtgatctagc

SEQ ID NO: 66 - DNA, 497 bp, Homo sapiens
ccacgcgtccggtcatatagagcaatttctcaccatacaggaaggcagtaaagaccctttctgggctggaaggaggagactgggagagagagagaaaggagacaggagagaggttctcatttgccccactcgtggggttgaaatcaaggtgtggggacaggtggggtcaaaggcggctcagatgcatttaaggatctggacacagagggtacacttgctcttccttctgtctggaaatcttggacaccagctcagagagaaagacctgcacaaacaaactataaagattgagcacacatgaagttttttgagttgtaagcaaacagcatcccacatcaaaatggcaggtgtgggacaatgtgcatatccattgttatgttgcatgatccatagatgaacaggaatctgtccacatcaatggcaatggttgtgttatttatttatttatttatttattttttacacatctcaaaaaaaaaaaaaaaaaaaaaaaaaaa

SEQ ID NO: 67 - DNA, 459 bp, Homo sapiens
  misc_feature (50): n equals a,t,g, or c
  misc_feature (455): n equals a,t,g, or c
gaaacgatactgatacatttttatattaatactaaaatacatagtttgcnttagggttcatactttgtggtgtacattctgcgggttttgacgaaggtatggtggcatatattcattgttactgtatcatgtagaatagttttagtgccctaaaaatcccctttgcgtcacctctttcattttcccctctccctgaacaccaggcaatcactaatctttttctgtgtccacatttttgccttttccagaatgtcatgtagttagaatcatctagtgtgcggtcttttcagagtggcttctttcacttagtaatatccttttaagattcctcaagtctttccatggcttgatagctaatttctttttattactgaatgatattcctttgtatgacgtaccacaattkcatttatccattctcctgstgaagttcagattgcttctaagttttgcanagtt

SEQ ID NO: 68 - DNA, 411 bp, Homo sapiens
  misc_feature (341): n equals a,t,g, or c
  misc_feature (395): n equals a,t,g, or c
tcgacccacgcgtccgggaagatattaaacagcgcacagggctgtgctatttagctggtccttcagggtcaacgaggtggtatctcgttgttaacccaatttggagggtctttttagaagagggtcatctgttctgatccacagctcacctttttcccatttaatagcccgtgttccttctccaagccccaggctattctgaggacacgttgtggttaggcaattgaaagttacacagtctctccttgcaacctttaggaatttcacaaaggataaatccctcatttccagggaaactggcaacggggtccaacaccttcataagtkcctcagtgcaattncccaaacaagacggaaagaaaatgggaagagaaagcggagcgcttttcacaatnaggcaaactgttttaa

SEQ ID NO: 69 - DNA, 486 bp, Homo sapiens
  misc_feature (444): n equals a,t,g, or c
  misc_feature (461): n equals a,t,g, or c
  misc_feature (483): n equals a,t,g, or c
agtttgctgatccctcaccttgcctctttcttcaaaatctccagtgttgagtattctccagtttccaagagacctgctttggaccactcatttagaaagtycktacgttctaaaaaaaataaaatttggttttccgtagactgctcctgctggtacttgttcaacttgagtatgttgagtaactaaaaataaatcaaatcgctcttccacatattgggcggccctttatatcttagaacaacactatgatcatgactccaggcagaatcttgcagaatcctggtgtgataaactttcacgggccttcattgtcaccagaagggagcataacactyttgcacagcttaaattgtgggcccacctaggttttctggggcgccaagagcaataagagggaagttatagcctgcattgctaacatgcttggaagaccttggagatctnaaccccaaagggattanagacgggggcccatgtggaacntgt

SEQ ID NO: 70 - DNA, 387 bp, Homo sapiens
  misc_feature (355): n equals a,t,g, or c
tcgacccacgcgtccgattaaaaacagaagaaatccgaaaaaaaaactgagatctacaatctcacaaagaaataaaagaatatgaaattgctactattcaacgattagttttaccttaaaaacggcagctttatatggctaatcttaatgaattaaaacaactttgagatattatttttatcctttcatactggcaaagattaaaaaggtttgttaacatcttgaatcagcaaaactctggagaaacaggcacattaagggcagaagacaaacttgtaccatccctatggaaaggtgattttggscaattaactgttaaatgacaaayctaaataccctttgggcctagctattnccacggctagaagtttattcccacagatatta

SEQ ID NO: 71 - DNA, 290 bp, Homo sapiens
  misc_feature (88): n equals a,t,g, or c
tcgacccacgcgtccgaaattttctaaattaactaagacttgtctcaaattactggggttaacattttggtaaccacagagggactcncaatggaggaacacttgaactttgacaaatcttttactggtgtttggtatcagcataagctaactttatgaatagtttgctgaggcctgggagcactccttccagagaatccctgctctcccaaagtttggttgagatctaaagtttattttgctgtacaactccctcttatttatttttttttttttgggraktttactgg

SEQ ID NO: 72 - DNA, 248 bp, Homo sapiens
tgaactgaggaccgagtctcctgccattccgagcaggcctggtatgggtaatggtgtgaaggaaggcccggtgcgattgcatgaggatgctgaggctgtcctgtyctcgtccgtctcatcaaagcgtgaccacaggcaagtgctcagctccctgctgtctggggccctggctggtgcccttgccaaaacagcggtmmtcccctggaccgaaccaaaatcatcttccaagtgtcttcaaaaagattttc

SEQ ID NO: 73 - DNA, 375 bp, Homo sapiens
  misc_feature (35): n equals a,t,g, or c
  misc_feature (74): n equals a,t,g, or c
  misc_feature (286): n equals a,t,g, or c
ctaatataaatcctaagaactcagacacagtcgantgagaacagagcaattccctttgccctcgttttaaagantcatgtacataaaaggtttgaacactttgaactttgaataagtttgaacacttcatgccttttggccactagcatgctgttattttatgtcgcaagacgagcaacaatgaggcatccacagctcccaggcgtcaagactgaaggacactctgcctctcccttagggtttgagatctctgagtcagggaacattgagtgaaagcaaagctganaatattactggggatcttcagtcttggggaaaagagttataggtgttggattaacatctagtgaaagcaagctgaaatattactgggga

SEQ ID NO: 74 - DNA, 549 bp, Homo sapiens
  misc_feature (15): n equals a,t,g, or c
  misc_feature (36): n equals a,t,g, or c
  misc_feature (52): n equals a,t,g, or c
  misc_feature (69): n equals a,t,g, or c
aaaaccttttaattntccctagactcccccctaagnccataaattcctcccnggaaaatatccccctanatgcttttaaaaatattcagagtaacaggttcccacttataagttatgaagtttargaatggttaagtactctctgtagtctgaaaaaaaatagcattgcgtcctaaaggaagctaactttctctagaagaacaattttaacagtgggggaatctgtccccacacttgggccaatgtttatgacaaaccatcaagctcattaaaactcccagagaagaaagcaaagaggatggtacttggtccttgattaaggttttgccattgaatccttcaacctcctaccactgcttctagctgtcagttccagaatttgaaacgcggtggaagaggctagtgggtgtacagaaaaaccttccttgtgaagcagggcagtttcctcacactctgaccacaatcaaataccattaacttacaaaagacacaggctgcaaagctgaagagaaggagaattgtattccccgagacrwcctgaaacaggca

SEQ ID NO: 75 - DNA, 452 bp, Homo sapiens
  misc_feature (14): n equals a,t,g, or c
  misc_feature (21): n equals a,t,g, or c
acctcaaaatcccngaactcnggggaacccacccgccctcagcccccccctaaagtgccggggtttaccagcccgtgagcccacccgcgcataggcccactttagattaacctttaccttatcctactgtcattcagtatcctacctgaactccctacagccgtgtagtcactgtgctaggcagggctagcaatacagaattgatagactgctgtccttgagttgaatgccttagtttatttatttctattctgtccttgctagataaaagcatttaagctataaagtttcaactaagtagagctgaaagtatctcatttattgattcagcaaatattaattgggcatctcttctgaggccaagcattattctaggtggggatttggcagtgaacaaaataaaacaacaaaagcccttccttcatggagcttgtttacaaaaaaaaaaaaaa

SEQ ID NO: 76 - DNA, 467 bp, Homo sapiens
acccacgcgtccgtatttatttatttttgagatggagcctcactctgttgcccaggctggaggttgcagtgagccgataacgcaccactgcactacagcctgggtggcagagcgacactccgtctcaaaaaaaagaaaagtaaccttttataaatatggggctgaaaacgttatttttaaattttggaaaaagttctactagcttggaagattacttagatttattttttcttggcttatttagatatttggcctatttttaaaactataataaataattggattttaatttgatagagaatcagaaaaacagagactttatataatttttgtacattkgattcattttaaaatatakgttgtaaaattcttccagtgcaatattttttggaaaatattgttctagtcgttgtttgtataggttgtttctaattattttaaaagaaccttcaaaaataaaaaaaaaa

SEQ ID NO: 77 - DNA, 165 bp, Homo sapiens
tgtataggaacarttgtgtaggacartgttctatataggacaatatctgaagatacattcctccatccattcttatctagcaatgtgctgagggctgggttgtaacaaccatggaacttacagtctagacaagaatggatggaggaatgtatcttcagatattgt

SEQ ID NO: 78 - DNA, 427 bp, Homo sapiens
  misc_feature (385): n equals a,t,g, or c
  misc_feature (394): n equals a,t,g, or c
  misc_feature (414): n equals a,t,g, or c
  misc_feature (422): n equals a,t,g, or c
tcgacccacgcgtccgttttttttttttttttaagagacagaggtcttgctttgttgccttggctggtctcaaaacacctgggttcaagtgatcctcccacctcagcctcccaaagtgctgggattacaggcgtgactgctaatgcccagcctccttgcagagttattgcaaagactaaatcagagaaccaatgctgtgatgtcaggggcccctggggtgatagggcttcatgtgtaattagtggtcagaataagacgggtccatcagtctgttcccccatcctcatgcagattacagatttaagcatagggaaccctgtgctttcataagtggaaaaagtgttgaatattggcaattttcacatggtttcagacttaacaaatnccccttttntggggtcccagggttttggnaagttgtnggtgc

SEQ ID NO: 79 - DNA, 367 bp, Homo sapiens
  misc_feature (236): n equals a,t,g, or c
  misc_feature (336): n equals a,t,g, or c
  misc_feature (337): n equals a,t,g, or c
acccacgcgtccgaattatcagaaagaatctatggaggttgaaaaatgtaactaatagtgtctcattctctattagtaatgtgttattctcatttatactgttgaaaaccgtttacagaaatatttaatatgattctctgcctagrgaatgagaagcttgcatctttagatcaaagatgaagcaaacaagagtttcctattgtgtgcagttttagaatttcttgcctcatggcttncatggcaggttgcagtttttcaatccttgtttggcaaaatcttgaacccatcatagtgtacttgggaaatgaatatgccatacatcgtaattttcctgtnnataatagaattttgacgggggtagaacttt

SEQ ID NO: 80 - DNA, 513 bp, Homo sapiens
  misc_feature (433): n equals a,t,g, or c
  misc_feature (446): n equals a,t,g, or c
  misc_feature (484): n equals a,t,g, or c
acccacgcgtccgcccacgcgtccggccaccctagcaagcagttgattccagagttcaggcaggcaaacacaaaataaacctgaaacatcttaaagtgccaataaataaggaaaggcacagaaaaaagacatgggcttgtcaaaaggacataggagtccgcataaatgtgttcccaatggccaaagacagaggaatttgagcagcaagataaaaaatgatagcattggattttcacccacagaataacgtaatagccagaagtccatagttatataaataaataattttaagaatacataggagagaagggacaactctttcttaagtagaattccaaagaatacatataaaaggaaagtgggaaaacagaaccaccattgggggaaataactgttatagacaagattcacagattgggtgctaaaattagtngggcaacgatttnaggagaaacggaatttgcgtagtcttcaggcatatctncactttaaaatgcttattttgctaccccg

SEQ ID NO: 81 - DNA, 424 bp, Homo sapiens
  misc_feature (346): n equals a,t,g, or c
  misc_feature (371): n equals a,t,g, or c
  misc_feature (385): n equals a,t,g, or c
  misc_feature (424): n equals a,t,g, or c
acccacgcgtccgcagcctgatggagtcttgctctgtcgcctaagctggagttcagtggtgcggtctcggctcactgcaatctccacctcccgggctcgagcgattcttctgcctcagcctcccgagtagctgggattataggcgcctgccaccacgcccagttgatttttgtagttttagtagagacgggakttkcaccatgttagccaggctcatcttggaactcttggacctcaaatggatccgtctgcctcggccttccaaagtggctggggattgacagacgcaaacatggcagatctttgtggaagaccctgcatgggcaaaaccatcacccttggagtncgagcccatggacaccattggagangtgcaaagccaaanttcaagacaaggaggtgagcccaactggaccagcagctn

SEQ ID NO: 82 - DNA, 408 bp, Homo sapiens
  misc_feature (355): n equals a,t,g, or c
  misc_feature (371): n equals a,t,g, or c
  misc_feature (383): n equals a,t,g, or c
  misc_feature (386): n equals a,t,g, or c
tcgacccacgcgtccgacgygccgaaactgtatcaccccccactgtgtgtaccattcctaccgtagtaggacgaaatgtcattcctagaatcacaacacctcacaaccctgcccagggacaaccgcatctgaatggaatgtcaaatataactaagactgttacacctaagagatcccattccccatccatagatgggactcctaagaggttgaaagacgtagaaaagtttattcgacttgaatcaacatttaaggacccccgcactgctgaagaaagaaaaagaaaatcagtggatgccattggaggagaatctatgcctattccaactattggatacatcacgcaaaaagagantacccagttaaagaantaccagattccnccntctccagtttccagcaaacaac

SEQ ID NO: 83 - DNA, 686 bp, Homo sapiens
cagaatccacagaaaggaaccacaggactggccacagcagtacagggaggcaatggaagatgaggccaatagagctgatgttgggcacaggcaaatctttgttcacaacttcaggtagaggaatgcatggcagtcagaggggccttgcaaggaggggcctttgagcctcagttctcatgtattggggggtgggggtgggtacatattgtatttggtatttgtgttccagttatatttatgtcttttcatatttagttctggtgtggtgtctggaaatgtttcaactgttttaatatattgtctgattgggtaaatgtgattgaccacttgctgtctctgttgtattttggtatgagttttgatagctctataaaatgttttggaaatctttccatcttgttgcattatctagaaaagaatatagcatatagctatagatataggcttttccttgaaagcttgaaaaaaattcgccagtaaaataatctagcttaaagtgataaactaacaaacaaatataacaacaactgaaaaggcactctaaattgtggctggcttccctttctgtctgctattgtatgaagaatactgatgtttacctgtatttgctttgctgtactaaaatgtaatgaaaaataaaagattaataaatgaaacataatgctaaaaaaaaaaaaaaaaaaaaa

SEQ ID NO: 84 - DNA, 556 bp, Homo sapiens
  misc_feature (163): n equals a,t,g, or c
  misc_feature (539): n equals a,t,g, or c
ggagatggagtcttgctctgccatccaggctggaatgcagtggcgttatcttggctcactgcaacctccaccttcagggctcaagcgattctcctgcctcagcctcccgagcagctgggaccacaggtgcacactgccacgcccggctaattttttgtatttnagtagagacagggtttcaccgtgttgcccaggctggttttgaactcctgagcccaggcaatatgcctgccttggcctctcaaagtgctaggattacaggtgtgagccactgcacccagcccatcttctgtattttctaacccttcccaaggtttacctcaggattgtaattgtctgtggatctgccagatttcccaacagaccatatatttcctaacagcaaggactatgtgtcattcggttttctatccccagtgtctaatcccatgtttttcacataagaagcacccattaaaatttgttccttagttgggcatggtggctcacacctgtaatctcagcatttttggcggctgaggcaggaggatagcttgagnccaggagttcgagacca

SEQ ID NO: 85 - DNA, 583 bp, Homo sapiens
tttatttatttatttatttttatttgagacggggtctcgctgtggtatgatcatggctcattgcagcttcaaccttccagccaagtttaatttttacaccaatgattcatttctgcttttacaggtgattactttatctcactagaaaaaaaaaatgtaaaaatctaaacaaaaagtgtccaaaacttacaataagccttaatctcgaataattaccatgacatgtgttacttgtgtgcttattgctgtacagccttctttggctttctgacaagagcaactgctgagcagaagcacttcagcctcgtctggcatttgatgaatttgattaatgtgtgctatggtaagtctattcccctgtataattttatgggagaggccatgtgcaagtctgaatttaaaaaaaaagaaaagaaaaagccttgtgcagaattattacctactcaatacattatatatatgccagagatggctaaagcagctatatgtcaaggtctgcaaaaacatgaagaagctggcatggaaattaacacgttggtggtctgcaatgtgttcaaagttggtgtttttaatgacacttaaa

SEQ ID NO: 86 - DNA, 338 bp, Homo sapiens
tcgaaaaaaaaaaaggcaaacaaatttatctgtatcaatttggaattaaaagatttgtgtgtatagattttttgttaaaaatagaagaaatagggggagggtccttttctgaaatctgagaatgatagggatgatgactatcaaaacccaggcctgtgactggcttgtttaaaaacaaaacaaggccggcccggtggctcacgcctgtaaatcccagcgctttgggaggctgaggcgggcggttcacaaggtcaagagatggagaccatcctggccaatatggtgaaatacagtctctactaaaaatacaaaatttagctgggcgtggtggcgcgcgt

SEQ ID NO: 87 - DNA, 1119 bp, Homo sapiens
  misc_feature (418): n equals a,t,g, or c
gagatggagtctcactgtgttgcccaggctggagtgcagtggcgcgatctcggctcactgcaagctccacctcccgggtccacactactctcctgcctcaacccctcaagtagctgggaccacaggcgcccgccaccacgcccggctaatttttttttttttttgkatttttrgtagagatggggtttcaccgcattagccaggatggtctcgatctcctgacctcgtaatccgcccacstcagcttctcaragtgctgagactacaggcataagccatggcacctggscaaccacaatacttktrrraggraacatatgagaaaatcttcatgacctktgcttagrcrragggctcttaggtgtgactctgwaggcacaatccatrcgagrargaratgacaagttgaatgtaaatntrraaaraaaragtcctgattgggcacagtgrctcacgcctgtaatcccagcactttgggaggccgaggcaggcggatcacttgaggtcragagtttgagaccagcctggccaacatggtgaaaccccatytctactaaaaatacaaaaaaatcagccgggtgtggtggtgcgcgcctacaatcccagctaccagggaggctaaggcaggagaactgcttgwacccaggaggcggaggttscagtgagccgagattgcctcactgcmctccagctcgggcgacagagcaagacgctgtcycataaaaaaaaaataagaaaaaaaaagagaaaaggcaaagctattgaagacggagaaagatccagcggttgccaagtgttgggatagaggtggggtttgacttcaaaggtgaaggaactaactgttctttacccttatagtggtgacagttacaggaatctatgtatgtgttaaaactgatacaagtatacattttaaaaaggtcaaacttactatatataatatttgaagataatgaaaaagggaaaaatgtaactaatgctcttttaataactccactgctatttctatttttattgaaaattaccactaaagcaaagacagtttctaaaaacaataaatgtattacaattacagaaacataatcctagcactctgggaggctgaggtgggctcgtgcc

SEQ ID NO: 88 - DNA, 559 bp, Homo sapiens
  misc_feature (492): n equals a,t,g, or c
  misc_feature (502): n equals a,t,g, or c
agttctccccaagacggcgattactctccagacaactcagcccagccgggggacagggtcatttgcttacaggtacttggagcttctgaaattgaggccagaggtggggaaaactgggaagaatgtgtgggttgggagggctgaaagcacatggcagacattcatgatgaaactgagatgaccttttggaaaaagattctgggattgttttaaaaactaacaggagattcatgaggtttagtcttcaggcaactggctttagcctggggcttccacttctgttttccttgcatggcttatgaattaacttggggtttgggctggcaaacctgctccttcttagagcacagatgtcattatctctctggaagtatggccttcttggaaactttgtggttcccatacatataacaagacaagcgtgaaaaaaaaaaagactttaagtgtggttttacttcgtttcttgtttactttattaatctttcctttttnatggcttttntttttgagaccgagtctcactctgtcactcaggctggagtgcatggcgaaatctcag

SEQ ID NO: 89 - DNA, 304 bp, Homo sapiens
  misc_feature (242): n equals a,t,g, or c
ggcacgagtcatatgctggagtttcatttttaaagcagttgaatcaacaaggtatgccttcattaattatatttattaggtgtttttaataatctgaggaatcttgtaaattgaatgctgtattacagtaaagtgaacttttttwatttagacaaatgatctaacccagttaagcatgcgtagaagaaagcctgggaagaaaaaaaacactaaaattttatagtagcatggttgtagttttnatctaccttgttttcaacagtgaggaatgtattccttctgtaatcaactgatttagcttttc

SEQ ID NO: 90 - DNA, 1055 bp, Homo sapiens
  misc_feature (419): n equals a,t,g, or c
  misc_feature (712): n equals a,t,g, or c
  misc_feature (751): n equals a,t,g, or c
  misc_feature (952): n equals a,t,g, or c
  misc_feature (957): n equals a,t,g, or c
  misc_feature (993): n equals a,t,g, or c
ttttacagtatatcacggttttatcacacaaccccggacagtaaaacacacagtggtgagaaatatacagatcaccgatcctttcaaattcggttgcagagacttgaaaggtctgtatgaggacattagaaaggaactgctcatatcaacawcagaacttmaggaaatgtctgagtactactttgatggraaaggraaagcctttcgaccaattattgkggygctaatggcccgagcatgyaatatycatcataacaactcccgatccgatgtccarttttcacaagctgattgctgagaaggttctaggcggcgtctgttaaaaagcattgctttctgttaattagacatgtgcaagccagccagcgcgccatagccttaattgcagaaatgatccacactgctagtctggttcacgnatgacgttattgacggtgcaagtcctcggaagagggaaaacacacagtttaataagatctgggggtgaaaagaaggctgttcttgctggagrtttaattctttctgcagcatctatagctctggcacgaattggaaatacaactgttatatctattttaacccaagttattgaagatttggtgcgtggtgaatttcttcagctcgggtcaaaagaaaatgaagaatgaaagatttgcacactaccttgagaagacattcaagaagaccgccagcctgatagccaacagttgtnaaagcagtctctgttctaggatgtcccgacccagtggtngcatgagatcgcctatcagtacggaaaaaatgtaggaatagcttttcagctaatagatgatgtattggacttcacctcgtgttctgaccagatgggcaaaccaacatcagctgatctgaagctcgggttagccactggtcctgtcctgtttgcctgtcagcagttcccagaaatgaatgctatgatcatgcgacggttcantttgnctggagatgtagacagagctcgacagtatgtactanagagtgatggtgtgcacaaacaacctacctcgcccagcagtactgcctgaagcaataagagg

SEQ ID NO: 91 - DNA, 1771 bp, Homo sapiens
  misc_feature (1720): n equals a,t,g, or c
  misc_feature (1752): n equals a,t,g, or c
  misc_feature (1771): n equals a,t,g, or c
tttttttttagataagacatctttattacttaatctttaaaacagtcacttgcctattcaattctgaaactgtttgttttctttccctcccccgcactcccgctctgatacacaaacttgttgtaaaaataatgcagaaacatatacgtcaatgagaatgaggcttttctgtagcatgtaaaccaaaccggacccttggcagttcgtcgtccctcagttctccagatgctattttttgcaggttctaccaagtgcttgttgattaccctagttgtaattatctagggaagagatgaatgtaagtgagagtgcagagcactggggagggtgacagtgaaatgcaattagaggcagcaagagagtcctagtctgttctcacataaccggacttgaacgctccagtgcgagcagagtgctgggggtggattccactgccgaaccacggcagctttgctttactcttcagcatgggggtggtaactagctgcacagcaagttatgaaatggaaagcaagcttaacagctgtaatctcatcggataccctggagcaaatgccttgggattgcctgaagtgaagtgtttagcatccaccaaatagttgagtttctaagatgggccatgcgggatccctgccacacgggtgtgggggcagcgcgctcctccctgcctcggctgctgtgtgtcttagtcttcatgtttccccttggcgtctcctctggtccctgtccatcttgtgcaccatgtgtccctgarggcgagtcacacctgkgtcttgagtctgctgtaaggtgttcagtctacctcaaggggtcatcatggtaagctctatcccacggcatcctccgtccatcaccacacacactggaatgtatcccccccgccctgccccttcgataacctcctgaccttgtctttcctataatcaccacaaactcctagtgcaaattggatgctgctttaaatgtgaaaacaattgttcaaaagctataaaacctgaatgaaagctgaagctgaatttataagccttgttgcatatgagccaaaagtgcaaaaagctctatataatgaactaacctgccactcgtataaatataaatatatataaatatattaaaatcagactgttctacaaaattgtgtatttgtatttttgtgtacgtacaattttctgctaagcagaaggaggatgtagtataggatgctgtgagaagagatttggtttaatcctatttctttgttacttatttttgttaacatcagatgcctgtctttgtcttatatgtgtatgacactgtttgggaaagctgcagtatctctcttcctgaggtccagaggccattaaagaataaacatggggcttagaggtgtcttggccaccaaacacaggtaagccaacagagttcggctcccgtacgtggtgtggtgggacctggggcctggagccacttgtactcctggggtgggactgagggagggaaagggctcccccacttcaggctggtcactgtatgttgacttccctctgggargcaaaattccacttgtaaaaatcagcttccaagacaaaagatgatccgatgtcacttctgggtcaccaggaagggacacaggatctctctgaactttggaacagaccctcatattctggggccagaagtttgcccagaaagcarcargtggctctgcctggctgtagagcccagctcattggctgtccancggcatggtcaaggtaagggcgaattctgcanatatccatcacacttgcgn

SEQ ID NO: 92 - DNA, 759 bp, Homo sapiens
  misc_feature (32): n equals a,t,g, or c
  misc_feature (58): n equals a,t,g, or c
  misc_feature (119): n equals a,t,g, or c
  misc_feature (758): n equals a,t,g, or c
gcgtccggattaacatggatttctgacctttnccttgaatcatgaatttgaatcctgnggatgaccatatattgaagcctctgatcccagaaaggtaataagctgaaagttgaactganagaccagataatagaggttaatacccttgggataggaaagaaaacttaaagggtaactgatggggttatccttagcaaaattctatccctatgagatgaccctaagtggagccatctctatgaggattaatccagagattgttgcacacctggcagtgtcaggtctgggaaaacagttgctgatgttttcatggagtgtgaaatactgaaagctgcgggcatcccttggggaccactgacccacactttgaagaaccctcaatgagtctgaaagaggttcagtatctcttgggaaggatgtgttccaggctccaggcctagtcttacatggccagtggggttgaaagactgtgcccctgcaatggtcttttcctaagacagttgaacaaagttccaagtctgtctgtcctattttaaccatctttaagaagcacaaaggggatatgagaaaaacagatgctgaaatgaaaattttaactgatatcttacttatctcacaagtcgtgtaaagaaagaaatgatatggtcgaatattagattagatggtttaatgatgttttgagtgttatatatgagctatgatgagacctagaaaataaagtaaaaataaaaaatawawaagccawraaaaaaaaaatnc

SEQ ID NO: 93 - DNA, 286 bp, Homo sapiens
  misc_feature (152): n equals a,t,g, or c
aacatattagtatgttggtatatacatatttctgactaattaatttcgccatgttgcccaggctggtctcgaactcctaagctcaagtgatgtgcccgcctcaacttcccaagtgctgagattacaggcgtgagccaccatgtccggcctgntttttcctatgcatgcataattacgatcaagtttaatttgtaattaggcacattaagagattaacaatagctaacaaaatggaacaattacaacaatatattgtaataaaagttatgcaaatgtgaaaaaaaaa

SEQ ID NO: 94 - DNA, 398 bp, Homo sapiens
  misc_feature (84): n equals a,t,g, or c
gcttctgcctctcccgctatctagatggctcggggaggcacaccacacaccaggtcaccttcctctctgaacccccagcacctnatactgtttctgtgcagagataaggctgggtgaaagcttgtgtgaatgatctgaagtcttctactctaggccagtctccaggagcattatgatctttargagggtgggcttggttcctctgtacaataatgggkcataaaactgagtggtcaagatcatcccggtgaggcagtccgtgtgttgccatagttgctgtaccggttaagaatgcacctggctgcaatttcctgaaaacctgacgtatagtggcttaaacaaagagtggtttattttccttctgtcatagcaatctgggggaggccactgtggtttgg

SEQ ID NO: 95 - DNA, 647 bp, Homo sapiens
cgcggacgcgtgggttgagaaacttttttattgctaatggtgaagaggctgttaaatagaaaaatatactacatgcacagaagaacatgggggacatatatatatgtatatattcgaataagactccaaaaagtagaaatttaaaaagtgctatacattgcatcaggttctaaaatcccaaaccccaaacagcctggaacatgttactctgatttcatggcgttgtaaaataacagagctgggaagaatattcaagatgacctgatttaacacctttcattctgttggggggcctttgatttcctatatccagaagttgagagacttactcaagattgtaccatgcaagctggcaactagaacccaaatccttggactacttgttgaatgcagtttttctagattgtaaattaaaaatcatatcyccacaacggctctggaaccccggggaccgcctcctaacccagcccacaagcgacagaaaacccgccatgccgctctgcagcctcacctcagacctctaaacgcttacttaaatgtaaaaaaaatttttttttacaccttttaaagactatatttaccattttgttgaaaaagtaaagaaaaaccatgacccgcaaccaaacgcgaaccacaatccccgagaa

SEQ ID NO: 96 - DNA, 534 bp, Homo sapiens
  misc_feature (471): n equals a,t,g, or c
  misc_feature (484): n equals a,t,g, or c
  misc_feature (509): n equals a,t,g, or c
aacttgaaatgtaatttttaggacagacacattagcattaatgaatctttacttcaaacatgtttaattcagtgcaagttatttttatgttttgctcaattttattaacattcaaaaaataaatttccattgtcttttggcataaagagagagcttaaatattcagggttcagttacaagttggaactccctggagcagaactcttacagttatgtatactaaatagcagtctagatatcttgaaggcaatttacttaaaaattggtctaagacatagaaatatgagacaaaaggagaatatgtgcttaaattccttaagggagtttgggattgtctgaaacacagtcctccattgtttytaagtgggaaacatttggggcagctcatatctaatgcttagtctctacttaacactgggctaggcattgcaggcatcagaagaggagtaagaagctcttgagggatcttgncaattataggagngctcatggataacataagggataanggattgccataagaaaaggtgccag

SEQ ID NO: 97 - DNA, 497 bp, Homo sapiens
gagaaccgatgatgagccctgatgaaagaaggaagaagacccgctgtctgcgaaggcctaaaggccgcggttgccaggaaccgtggagggccaactcctcccaaccgccctggtgcaaagtcccacgcggcgaagagttttggagcagcgcttacctagaaagatgtttaaattctgaaccaggaattgtctccaactccaggcgctcagggaatcgccttttccggtgtccaggcgctctgcagacaaataaacagcagaaggtgaatggcggctgcgagggaagggagttggaggccgggagtgggaagcgaggctcatgcgggcgccaaggtggccctgggggtgacgcgaacatcagggagtcaccagggcactcgtccgtgtggcgcactcattgctcgaaatgttccagtctacaaatggtccgaagatggtgatttatttttgtaaaataaatacatmctccatctccmcacccawaaaaaaaaaaaaaa

SEQ ID NO: 98 - DNA, 618 bp, Homo sapiens
  misc_feature (23): n equals a,t,g, or c
accagggcttcagtgccggatgncccactgtggtgggagttccccgctctctccagcagccccgtcccgtggagcctgaggacaagggagccctttcatccgagatgctgagtatgggcaacagggaggaggggaaggaagaggcagctccacgtgctgatcatcttccgggtctcaccgggcttgtaccagttggtgagcgtcatcatgacgtgcagtgaggccagcaccaggcagaagtggaagaaggagtagctgtaggtgacgccgtcctgctcgttgtcaaaggcccggccctcacaggctgccacctgctgctgctgctgtgtggcgtctacataggtgggcactcctcggtctgcatcaggctgttcacctgccggtggtctgaggagcgcagactgatgaagagggtgcacaggaggaagatgatgaggcccacaatgctcggggcatcccaccactgggtctcatagccctcgggcgctgccacaactgtctcgttgcccagctgggtagggctgctcctctacctgtggaccctggtagccccactcctcctgcgcaaccgcgacttcagctgaggcagcctcacagcctgccatctggtgcctcctg

SEQ ID NO: 99 - DNA, 456 bp, Homo sapiens
tcgcaagccccaccgtgggagccaatggggcttcggcgcttctgcatagagaaatgggggaaaattactyctctcccccgggcacacacatgccttcaaccgactggatcttccmaccgtatcccctcgtactcccatgttgtatgaaaagctgttaacagcagtagaggaaaccagcacctttggacttgagtgaggacatggaacctcgcctgacattttcctggccagtgacatcacccttcctgggatgatccccttttccctttcccttaatcaactctcctttgattttggtattccatgatttttattttcaaaccaaatcaggattgacaaaagctgtgcatgaagaactgccttcttctaagatctaaccttcaggcttctctcctctgttttcaatgaactgctagcctgtatgsaatattaaaaaacagctgtctcaaaaaaaaa

SEQ ID NO: 100 - DNA, 411 bp, Homo sapiens
  misc_feature (394): n equals a,t,g, or c
  misc_feature (404): n equals a,t,g, or c
ttttggtgagaatgtcatgaggtgtacaaaatagcagataggatattctataaatttaggtgcgctagagtgaaccaagtgtgggctggggagtcaggtttaatttctagttttttaccatctatgtagcatgttgggcaagtcagtggtctctgggcctcagtttttatatccgtaaatggtaaaaatgttagaagtctacttcacacattttggtgagaatgtcatgaggtgtacaaaatagcagataggrtattctataaatttaggtgctatttctcaaatcaccttcacatctgaggattttcttaacygttgtaaccgtggtgacttccctttcatcacygttcattttcacagccctcttcccggctcttccttaaaacccccgggnatttgtttcntaggggt

SEQ ID NO: 101 - DNA, 334 bp, Homo sapiens
tgctggatggaaggactctgagcctaccaaaggaagcgtatttacaaacctctaggtactgacttgttgctgaaggtcagaaatttgcaatgacatttggatgtattcaagggtggaggggcaggtttggggaaagttcttttaaagaaaaaatgcaaaatttgattacaagaagctggggtgcctcccagggcctcggaaagggcttgcacaagtgaagcaccctgaagataatgcttcattagctttacagtgaagccacctctgaatctctgtttggtgtttgtcaaaatattccaagttgaagcaggcctgatttatatgattcgcacag

SEQ ID NO: 102 - DNA, 298 bp, Homo sapiens
  misc_feature (80): n equals a,t,g, or c
  misc_feature (287): n equals a,t,g, or c
ccctctgaccacccccaacatcctggcaagtcactctcctgagtatttaggcttggagcctggagacctggctcccagtncagctggaaaagtgatcaacgcacagtgcggcttatggatccttcccacccactcaccacccacctgccagattatctgttggcaaatcccaggcctgatagcatttcctctgtcagtatttcagtgtatacctctaaacaataagggatttaagagaaaacataatcctggtaccattgttatacttgaaaagttgcctgtgcgcntgggcttcatg

SEQ ID NO: 103 - DNA, 615 bp, Homo sapiens
  misc_feature (11): n equals a,t,g, or c
  misc_feature (19): n equals a,t,g, or c
  misc_feature (54): n equals a,t,g, or c
  misc_feature (118): n equals a,t,g, or c
  misc_feature (604): n equals a,t,g, or c
acaccccaaantaagccgngtcaagattttaaaatcctgggaaggttaaatctngaagaccttagggacccagccaacccaactctctcattttaaaagtgagggatccatagcaccngattacttgcctaagatcatccaggaacgaagacaggaatcccaaattccagtgttcttcctagtattaaacattgcccctttcgacaaattttggatttcattcttgttatatttcagtactcttgctgatttattttaggtttaactggtaaagaatgaacatttcagaagtgttaggattagtcagtgtcatcgcttatgtatatgaatcacttgccaaagacactggctctcctcagctgtaaccagcatgtcaaatgtgaagattattgtgtgggatcctttggtttcattgttatgatgtattttataaatgtactagttatatccttgtttatgtatttttgctgatctttcataaagcagaatggtatgtatcggattgttttaatgttatatattggattgtattcgwtgttacaaaaccaatattctatggagaatgaaaaaaataaaggactaaattaaaaaaaaaaaaaaaaanctggggggggg

SEQ ID NO: 104 - DNA, 144 bp, Homo sapiens
  misc_feature (116): n equals a,t,g, or c
ctggctgatggacagcttcctggaaagtctctgacccacctccacccagctctggtctcacacttttcctcctctgcctgggtttctcctggcccaccagccctccaccamcgcanacacggtggctcagtgggcacaatcaga

SEQ ID NO: 105 - DNA, 374 bp, Homo sapiens
  misc_feature (127): n equals a,t,g, or c
  misc_feature (369): n equals a,t,g, or c
aatttttttttttttttttttttttttttttaactggaaaaaacttctttcatcccagggactttatggctgggatcaaaggggtgactcacttgtttgcacaggaaacaaaaggcaaaaggaagtnttggcatcagttttccatctgcacatataacccccattcctccatgaattgcatgagataggtttcattttctcctgggggcctgtctggagccggctcctcatagagtctagatagaagaccctcctctccgagcccatccccctcagaaggctcgcagccctctgaatcctgggtcgaagctggacagcgaaggaatacacagcctgccagtttggggatcccagttcgaccaggggttnttcga

SEQ ID NO: 106 - DNA, 299 bp, Homo sapiens
  misc_feature (260): n equals a,t,g, or c
gccctcaccagcccagccaggccatagtttacagagagctaaaccagcaacctcaacagaacatgttgtcaaatgatcctctctaaaaactgttgattaatgagctgrtgtcagccagatggaaggttatgaaagcatggtgtcaccargttgccctaggacctatttgtaatattcccttacagaaagcttacacctggaaatgtaagacatgtgggaaggcaatttattcagggtaaaggccttggaagactaaaganttaaagaattcatactgctgaaaactcctatttatccct

SEQ ID NO: 107 - DNA, 154 bp, Homo sapiens
  misc_feature (149): n equals a,t,g, or c
aattcggcagagctggtattcaaacagcttcttcctgggtccggacttcatgtaatatgcatatgggtaggtgtattgcagggtgtatcgacaattggccaagagcttggcagcattctagcaggctcagctggaggctgaattcgganaacct

SEQ ID NO: 108 - DNA, 319 bp, Homo sapiens
  misc_feature (113): n equals a,t,g, or c
  misc_feature (279): n equals a,t,g, or c
  misc_feature (291): n equals a,t,g, or c
agggaacagccatcacccctagggctaagggaagagaaaacagagaaggaacgtggaaactcagaggaggttccccaaggtggagagacctccgaggggtggctgtggttgcntgggaatatgctgcctgtcccatgctggagaatcaacttactggaggtgcccccccgccaagccacaggagcagagagctgtcacggtggggaatgctgctgggacccgtgcaggacgaaaggagacagaagaaaaaggccattttcctcctctagccttgttagnccctttcaaagncccattttgggttcaagttggcaagggt

SEQ ID NO: 109 - DNA, 352 bp, Homo sapiens
  misc_feature (241): n equals a,t,g, or c
  misc_feature (317): n equals a,t,g, or c
  misc_feature (340): n equals a,t,g, or c
agcccagcctccggagtagctgggactacacatgcatcaccacaccccactaatttttaaattttttgtagagacagagtctcattatgttgcctaggctggtctcaaactcctggcctcaattaatcctcctccctttgggggattagaggcaggtgggatcccttgagcttagggaatttgagactaggctgggcaacatagtgaggacctcatctctaaaattgaaaaaaataaaagncaccagaaaaaaacctaaaaacatgccaagtggcatcagtctttggttgaaatgggcagcagaagggtgatggccngggtggggggtggggaatggttntttttcagcaga

SEQ ID NO: 110 - DNA, 422 bp, Homo sapiens
  misc_feature (4): n equals a,t,g, or c
  misc_feature (408): n equals a,t,g, or c
tttncacaaggctgcggacacccaccgaacccctttatggttttagcaccttccttagccaggagcatcaagaagcactttatcgctaagaggttctgtagaacaggaaagacacaagtttaaacagcgatgcattggctagaaataacctctaaagaagcacacatttccctctgtcacgttatagatcgctaacgactcctcgggtgatgttttatgtcctttaagcctcatatcttacagcgttagaatgtgggatgccagcaatygataaattttagtgtcatggggttgggggaagaaatgcctatcaaatgctgaccaccagtttttcaaaaaaacttccattgggcaataaaaatggcaagataatttagataaaaaaaaaaaaaaaaaaaaaaaaaaccncggggggggccccc

SEQ ID NO: 111 - DNA, 220 bp, Homo sapiens
  misc_feature (79): n equals a,t,g, or c
  misc_feature (207): n equals a,t,g, or c
agggaacacttggcctcatgtgatccttccaccttggcctcccaaagcattgggattacaggcgagagcactggttggntaaaatatttatatttacctgacatgatttgttgatttgggggctagggagttcttaaaacaacaataaaaaatcttctgtggctgcaaaaaaaaaaaaaaaaaaaaaaaaaaaaaaaaaaaaaaaanaaaaaataaaaaa

SEQ ID NO: 112 - DNA, 321 bp, Homo sapiens
  misc_feature (269): n equals a,t,g, or c
  misc_feature (279): n equals a,t,g, or c
  misc_feature (283): n equals a,t,g, or c
aattcggcagaggcaaccttttaatttttttaaaccattttggtgctgtttcttagaccctttttgtatgtacatgaatttaaaaataaaattttgatcatactcacatttatttttttatttcccattatatgggataaatattttaagttatcacataacattcaaaatggaatagctgcgtaataatccctttgaataagcatgccatagttcacttgcctatcttccagtggaaggcttatttaacaattctccctatttttaancctctatctngggnggctccaggctgatcttggggctccgggccccaaggaa

SEQ ID NO: 113 - DNA, 146 bp, Homo sapiens
  misc_feature (14): n equals a,t,g, or c
caaacctgggtggncagagtaagactctatctcaaaaaaaatgtatacatatatacatatatttacctcagtatatattttcctacacatgtctggtttttacaaaagaaacaaaaaacaaaaatcaaaatataaggcacacaaaa

SEQ ID NO: 114 - DNA, 77 bp, Homo sapiens
aggatagacagacctctgcagtaagagagtggttgggaaacccagggtgttccttggatctcaggatctgagccatc

SEQ ID NO: 115 - DNA, 201 bp, Homo sapiens
  misc_feature (120): n equals a,t,g, or c
  misc_feature (125): n equals a,t,g, or c
aattcggcagaggctttgtggggccgaggagaaggcaaagctgccttgcatttgcctggtgcctgctaagccccaagtccatccctcccctgaacaggacgctcgcagggccctgccctncagantgcacgtggagtcctctgaggttcgggggtgtgggttgcacttgagggaccatcttcctgggagatcccgtagagt

SEQ ID NO: 116 - DNA, 254 bp, Homo sapiens
  misc_feature (220): n equals a,t,g, or c
aggttctttctgatggtgaaaccatgtatttgccctctgtgctctgcttcctccttwgtcttagagcaggacaagctggggaaaggcattgtgtttggatgctggcctgcacctgagccttacttccctgtcctgacattctgtaaacagactgtggttcctgcmcaggccctggggctggggctctgatgcataaatcattggttctctctctctctgnacttcttaagtgaactcattccctgccccctggg

SEQ ID NO: 117 - protein, 77 aa, Homo sapiens
  misc_feature (22): Xaa equals any of the naturally occurring L-amino acids
  misc_feature (24): Xaa equals any of the naturally occurring L-amino acids
EFGTVKEKELALPQLVSQAGGXWXGLRQVLGLANLGEMPDDIALLVLSRNLAWNPGISPGRIQFAEQDGNLRPEVCR

SEQ ID NO: 118 - protein, 60 aa, Homo sapiens
  misc_feature (38): Xaa equals any of the naturally occurring L-amino acids
IPNSSMPRYPRTSTSVRHIQKNITSPNDLNKLPGTNPXGNRDVDLFRQIQNSEETQRNSG

SEQ ID NO: 119 - protein, 75 aa, Homo sapiens
IRQSSVSKMSLSIQSFQLQAGSTPDSPSLPLPTANLLPHPICLPSNRSLVTDLSSLDPSASFCLLFPKVRHICHW

SEQ ID NO: 120 - protein, 29 aa, Homo sapiens
AEFEMLLGHRDALLSFVTAIRTLSSFILG

SEQ ID NO: 121 - protein, 52 aa, Homo sapiens
  misc_feature (32): Xaa equals any of the naturally occurring L-amino acids
KECWPVLNMLEKSLPGHRDTATQIQHVSPMCXVEPPAKKAATLAEGDKDNDI

SEQ ID NO: 122 - protein, 60 aa, Homo sapiens
NQASGCPEGISQWFTLMVYPLQKSYSYRLCYDLSIYRLKVWREVCYGQLTNRTFKPDLQI

SEQ ID NO: 123 - protein, 96 aa, Homo sapiens
RGEAGPNLAWASRGPGLAAAVARLAWPTGCSVIAASSRPTGRRASASPTAGTCTATPASAKTDADIQAFFMSIDSLCKKYSRETSQVSCEGCGLVP

SEQ ID NO: 124 - protein, 64 aa, Homo sapiens
FIDLNHDHPGVPDSHTRHPRNQTSLDLLVCCSSTMGSAPTSTAPPRSASALPRSHTPPWHLSAP

SEQ ID NO: 125 - protein, 96 aa, Homo sapiens
  misc_feature (2): Xaa equals any of the naturally occurring L-amino acids
  misc_feature (75): Xaa equals any of the naturally occurring L-amino acids
  misc_feature (87): Xaa equals any of the naturally occurring L-amino acids
LXQDQRSDLLTVTKLVSGREPGIECELSLFSFVRVAKSTCLWLLRKTVVPAGHGAQPVIPALWEAKAGRSLEAGXRDQPGQHGETQXLPKIQKLAG

SEQ ID NO: 126 - protein, 88 aa, Homo sapiens
  misc_feature (49): Xaa equals any of the naturally occurring L-amino acids
  misc_feature (55): Xaa equals any of the naturally occurring L-amino acids
  misc_feature (63): Xaa equals any of the naturally occurring L-amino acids
  misc_feature (71): Xaa equals any of the naturally occurring L-amino acids
PGVVVCICAPNYSASQVAGITGACHHAQLIFAFLVETRFHHIGQAGVEXLDLREXNLLKLPKXWNYRREPXGLAFFFFKKWETGALVY

SEQ ID NO: 127 - protein, 70 aa, Homo sapiens
LASTLLEKQFQDQNMLNKQEIYTNLILKWTAFLSLALSHVALNTHMLKKSYTDTCMHLINYPISGAFNKF

SEQ ID NO: 128 - protein, 98 aa, Homo sapiens
NQITKYTLSILNYLFCFIDFYVFLYTYIIVLITVDLLEIWESNLRISILSFYQVVLAVLGPLHFPITFGIRLSIFPQNKACWDFEQDCMESINQFSEN

SEQ ID NO: 129 - protein, 124 aa, Homo sapiens
  misc_feature (1): Xaa equals any of the naturally occurring L-amino acids
XGGVNLFANDGSFLELFKRKMEEEQRQRQEEPPPGPQRPDQSAAAAGPGDPKRKGGPGSTLSFVGKRRGGNKLALKTGIVAKKQKTEDEVLTSKGDAWAKYMAEVKKYKAHQCGDDDKTRPLVK

SEQ ID NO: 130 - protein, 23 aa, Homo sapiens
HVIHTKEYSLICIEIKHNKIKKK

SEQ ID NO: 131 - protein, 70 aa, Homo sapiens
  misc_feature (8): Xaa equals any of the naturally occurring L-amino acids
  misc_feature (28): Xaa equals any of the naturally occurring L-amino acids
  misc_feature (35): Xaa equals any of the naturally occurring L-amino acids
  misc_feature (38): Xaa equals any of the naturally occurring L-amino acids
  misc_feature (47): Xaa equals any of the naturally occurring L-amino acids
  misc_feature (51): Xaa equals any of the naturally occurring L-amino acids
TFSFILSXKFDQLAKLNTPIKIFLHMKXLPIKILXLGXDGNIVPKWXHFAXLRTALPNSGIKGFEDGKKK

SEQ ID NO: 132 - protein, 117 aa, Homo sapiens
  misc_feature (117): Xaa equals any of the naturally occurring L-amino acids
LHRAGLSYEARHVVSPEQIATSDKMQHFKRTGTGTPVKRVRKAIEKSETTSEHTCQLCGGWFDTKIGLSNHVRGHLKRLGKTKWDAHKSPICVLNEMMQNEEKYEKILKALNSRRIX

SEQ ID NO: 133 - protein, 48 aa, Homo sapiens
  misc_feature (32): Xaa equals any of the naturally occurring L-amino acids
ETPPSGLVCSRDWVTAAFFRLGPVIRETIPWXLGVPLAMNEEKGGGHT

SEQ ID NO: 134 - protein, 43 aa, Homo sapiens
EAVANVSYSEWSRLTFIRETLSLLIAEGLAHRLRLHILSLGYT

SEQ ID NO: 135 - protein, 99 aa, Homo sapiens
  misc_feature (40): Xaa equals any of the naturally occurring L-amino acids
  misc_feature (48): Xaa equals any of the naturally occurring L-amino acids
QNYMFYFHVCKTKSFFLDGFLISFSHNSQVNLVALARNRXNFGTSKTXWPLSMGRQRPSFKMKLLVSHIRHSLSSLATRPHSERCSLLKVSGFNQAIFH

SEQ ID NO: 136 - protein, 35 aa, Homo sapiens
  misc_feature (12): Xaa equals any of the naturally occurring L-amino acids
KSNLTVLSSISXCFMTIKIHFWMCTGKKKKKKKGG

SEQ ID NO: 137 - protein, 60 aa, Homo sapiens
KAFMNVKQGRVNVQQPSFLDHSCSRGEESGGQQRRVQVKCKDGGWVWWLMPVVFLALWGG

SEQ ID NO: 138 - protein, 98 aa, Homo sapiens
  misc_feature (82): Xaa equals any of the naturally occurring L-amino acids
GRPTRPGACYHIQLIFVFLVEMGFHHVGQAGLELLTSGDPPTLASQSAGITGMSHCAQPNRVIFIKETPPPSTHKLLCFTHXSELEELGISLLEFIHC

SEQ ID NO: 139 - protein, 71 aa, Homo sapiens
DPRVRVSPLSWRVPKMNNPSVLSYQSLRSSVSCNIFGDHKRTRDSRFTVSFGSGRWSPGPQETCDPRYHWG

SEQ ID NO: 140 - protein, 41 aa, Homo sapiens
CEWTCCLSEHGTITQLTGIFSIPKMNICFLVDKNVLLIREE

SEQ ID NO: 141 - protein, 56 aa, Homo sapiens
FSCLSLPSSWDYGRTLPRLADVCVYSRDGFSPCWLGWFQTPDLMIRLCWPPKVGLS

SEQ ID NO: 142 - protein, 75 aa, Homo sapiens
KACLKCFLVTWERAGSTGKWHVTGASCHFVPFPVLPQPCTVGMQKSRRNSNVKIVDKQCRESSVALNIKIKDTWS

SEQ ID NO: 143 - protein, 41 aa, Homo sapiens
IRALFSKNSEAGKRSSLQIKDYKFSIVSAILEGVQEMFLSV

SEQ ID NO: 144 - protein, 84 aa, Homo sapiens
  misc_feature (74): Xaa equals any of the naturally occurring L-amino acids
  misc_feature (78): Xaa equals any of the naturally occurring L-amino acids
  misc_feature (82): Xaa equals any of the naturally occurring L-amino acids
KFINLKTKYAKMCPGLRNNTAHSSEVVGSSVCFGVIHFFHRLLGPCIHSCSEHTPWYLMTRMDPVQAPGLPKEXYFWXAGWXRE

SEQ ID NO: 145 - protein, 89 aa, Homo sapiens
FIRMPTKAEGVEQNSSKLQLNFFSIDMNHGQVYSAATKTVKCFISTAEASQVIINKAFLGSFSGVGSKMEGVLLQVTNEEVVNHRVFKK

SEQ ID NO: 146 - protein, 46 aa, Homo sapiens
  misc_feature (17): Xaa equals any of the naturally occurring L-amino acids
  misc_feature (39): Xaa equals any of the naturally occurring L-amino acids
  misc_feature (41): Xaa equals any of the naturally occurring L-amino acids
  misc_feature (42): Xaa equals any of the naturally occurring L-amino acids
RYWFRVQAENIRRVVLXMAKAGEYKGKPRSRRLHPREIXGXXKGLD

SEQ ID NO: 147 - protein, 71 aa, Homo sapiens
  misc_feature (24): Xaa equals any of the naturally occurring L-amino acids
  misc_feature (68): Xaa equals any of the naturally occurring L-amino acids
THASASICEMMFYLCVRMRNGSHXTKCWKLVSLETRVSGATAQGCVFNYRIPRNSSLGCHSNIFSGLXSHT

SEQ ID NO: 148 - protein, 80 aa, Homo sapiens
AVPVLRAEQVEVIPSFLLRSFFLASDQKPSSTPSPSQTCRRRASGKAPGPGLSVLGARAAGGPSLYIFHFGILSSNCCKT

SEQ ID NO: 149 - protein, 111 aa, Homo sapiens
DRSCSKMLIRQNLALDCKQKKSRSRSGSKKKMLTLPHGADEVYILRCRFCGLVFRGPLSVQEDWIKHLQRHIVNANLPRTGAGMVEVTSLLKKPASITETSFSLLMAEAAS

SEQ ID NO: 150 - protein, 164 aa, Homo sapiens
PMSSGLYPTTSYLMEPVLVLCVHLVHLRSCIYPAHAIDPALFASPVAASGHEKDRITGSQIHKPHQEDHPRNAWRLRSSLRLLHLETQDEDPAWGCQRFFACLTPMTPPGPYGSTQKQFSPTGGQLQPITISSLPQPLSSKHLLPVHPHPFPQTAFEKSLTYEL

SEQ ID NO: 151 - protein, 53 aa, Homo sapiens
  misc_feature (23): Xaa equals any of the naturally occurring L-amino acids
YSKMHEFLCIHAKLKIPNSAFFXLHMTLQVCIIYVPDNILGDSYSYFLNYVKN

SEQ ID NO: 152 - protein, 32 aa, Homo sapiens
HGQIKNSVTKHLYNHSQVEVAANNLDIAGRMT

SEQ ID NO: 153 - protein, 54 aa, Homo sapiens
PIYLPKGLGLHISSDCGLRLQHMTFNSARTRGCLSIFPLKCIPIFPGVHLSFAF

SEQ ID NO: 154 - protein, 119 aa, Homo sapiens
  misc_feature (63): Xaa equals any of the naturally occurring L-amino acids
  misc_feature (103): Xaa equals any of the naturally occurring L-amino acids
  misc_feature (106): Xaa equals any of the naturally occurring L-amino acids
MCLITLNNSYRMFESCSGFSGFCASPIEESHGALISSCNSRTMTDGLVTFRDVAIDFSQEEWXCLDPAQRDLYVDVMLENYSNLVSLDLESKTYETKKIFSEXDIXEINFSQWKDKSKT

SEQ ID NO: 155 - protein, 57 aa, Homo sapiens
  misc_feature (28): Xaa equals any of the naturally occurring L-amino acids
LRTGKTHYRECWYACRYRSGIPGSTHAXGFNNLFNNTCLKCLSPVLEYKLREDKDHV

SEQ ID NO: 156 - protein, 107 aa, Homo sapiens
EIDEEHVEDDGLSLDIQESEYMCNEETEIKEAQSYQNSPVSSATNQDAGYGSPFSESSDQLAHFKGSSSREEKEDPQCPDSVSYPQDSLAQIKAVYANLFSESCWSA

SEQ ID NO: 157 - protein, 60 aa, Homo sapiens
AFRPKVAFLMDSACLSYKWSQIQSRNVSILGKENRKSSPTVGVYKNVSRLLNSQHSISFF

SEQ ID NO: 158 - protein, 54 aa, Homo sapiens
  misc_feature (4): Xaa equals any of the naturally occurring L-amino acids
  misc_feature (21): Xaa equals any of the naturally occurring L-amino acids
  misc_feature (35): Xaa equals any of the naturally occurring L-amino acids
  misc_feature (37): Xaa equals any of the naturally occurring L-amino acids
  misc_feature (38): Xaa equals any of the naturally occurring L-amino acids
  misc_feature (41): Xaa equals any of the naturally occurring L-amino acids
  misc_feature (42): Xaa equals any of the naturally occurring L-amino acids
SRVXIFISVFQTNVVGHSLGXTWHSLRNSPGEKIXLXXRSXXSIPNPDYIQRPK

SEQ ID NO: 159 - protein, 53 aa, Homo sapiens
  misc_feature (52): Xaa equals any of the naturally occurring L-amino acids
KLRKEKPKRNEQILRDLWDTVRCTNIGHDESLMSTIIFTHSHTCPRELKTCXT

SEQ ID NO: 160 - protein, 53 aa, Homo sapiens
  misc_feature (40): Xaa equals any of the naturally occurring L-amino acids
  misc_feature (41): Xaa equals any of the naturally occurring L-amino acids
ILLIHYFLLCAFIWEILLVYLAIESLSLTRKCQPYESGKXXLSLSHMKNELNT

SEQ ID NO: 161 - protein, 33 aa, Homo sapiens
  misc_feature (29): Xaa equals any of the naturally occurring L-amino acids
AALPEALRQECSPPNKLTSQLTFLSNASXKKCF

SEQ ID NO: 162 - protein, 43 aa, Homo sapiens
  misc_feature (18): Xaa equals any of the naturally occurring L-amino acids
  misc_feature (40): Xaa equals any of the naturally occurring L-amino acids
YPKPVSWLGYYLIMLCSXMIILGEKWSPGVVCFGTVFKIXESS

SEQ ID NO: 163 - protein, 288 aa, Homo sapiens
  misc_feature (50): Xaa equals any of the naturally occurring L-amino acids
  misc_feature (69): Xaa equals any of the naturally occurring L-amino acids
  misc_feature (162): Xaa equals any of the naturally occurring L-amino acids
NHSALFSEVLPGAPRQGWGLAGEAGPECGPAASPLPGCASACPGKRSNSXGPGRKPSVPPKVLLEILGXSRSSLAEGVLGARFPNPPIPSPRHVPPAVCSRVTGMVRFSGGIHEGLNAPVSVHLKSGAKPRWRWLAPIAPMVCLADVRHQREGLFPPLWQRXTKRYYCKCALSGSAPHDYSCVKTAASTRQPQGRDPFPLSPFAEPKLAPRRAPSRDPGWRKSWGIQRHGGWEPDEPPPPRTVPTVTPPVGPPVPKKKKKKKKKALHAPAEGSEEARDEGRVRGEVAS

SEQ ID NO: 164 - protein, 43 aa, Homo sapiens
TKQINIQDCKITSSSTGLHVQAYLGDSVHLVPDHCNKVNTAIK

SEQ ID NO: 165 - protein, 57 aa, Homo sapiens
  misc_feature (35): Xaa equals any of the naturally occurring L-amino acids
  misc_feature (49): Xaa equals any of the naturally occurring L-amino acids
  misc_feature (54): Xaa equals any of the naturally occurring L-amino acids
SVLEVLPFEIMFLSQLHFVIERGMFQITGKLIYVXTTLSALLYPQQYYXAVRTXNLY

SEQ ID NO: 166 - protein, 135 aa, Homo sapiens
  misc_feature (27): Xaa equals any of the naturally occurring L-amino acids
  misc_feature (30): Xaa equals any of the naturally occurring L-amino acids
DQSKKSFFRNSKVTRISPSPTQNQSSXPPXCLTQETVLLNVHPEYKHCVFLQMLREAKEKEKQRLAQQLTMERTAHYGMLFDEYQGLSHLEALEILSNESESKVLLHYSFEMACLVMCCLNMKETGKSAIKRSHF

SEQ ID NO: 167 - protein, 103 aa, Homo sapiens
  misc_feature (8): Xaa equals any of the naturally occurring L-amino acids
  misc_feature (31): Xaa equals any of the naturally occurring L-amino acids
RGVKTAAXSFIILSDDCIKPFMLCGIVNFSXIPIHLRAREILIHLTLVGIYVTYPNKNVIKQPQSHSVNLALNVASKISSLPYEWNVLPRKRSITMSSCVLHH

SEQ ID NO: 168 - protein, 77 aa, Homo sapiens
  misc_feature (29): Xaa equals any of the naturally occurring L-amino acids
ALFEFKILIPSRDIFYRSVSETGSGYFLXRLYRASHHTQTLHSPRAPTHSTSCSPGGKRDSNMKCLKIHFTSFPCES

SEQ ID NO: 169 - protein, 93 aa, Homo sapiens
  misc_feature (49): Xaa equals any of the naturally occurring L-amino acids
  misc_feature (61): Xaa equals any of the naturally occurring L-amino acids
  misc_feature (72): Xaa equals any of the naturally occurring L-amino acids
QIKKTPLHSCLYHLLPSLGLFSSFWPTANFVSQDSSPSPSHHWLCSTLXVIMSTFLEERGXNVDVGPTLSAXLVVLFVYLFVRVLLCLPGGSA

SEQ ID NO: 170 - protein, 67 aa, Homo sapiens
LACSLVSFLLYPHFQGVQASYLENVRQCDVAAPPLGVYRWQHIFTQCVYECSEQAFIMAKNEIIHST

SEQ ID NO: 171 - protein, 61 aa, Homo sapiens
  misc_feature (10): Xaa equals any of the naturally occurring L-amino acids
WGFARKGLHXCHNILISPGLGQGGNLQVPKEIVFIISISAKALMLQKESIMWSKSSCFGLF

SEQ ID NO: 172 - protein, 99 aa, Homo sapiens
HASGHIEQFLTIQEGSKDPFWAGRRRLGEREKGDRREVLICPTRGVEIKVWGQVGSKAAQMHLRIWTQRVHLLFLLSGNLGHQLREKDLHKQTIKIEHT

SEQ ID NO: 173 - protein, 61 aa, Homo sapiens
  misc_feature (44): Xaa equals any of the naturally occurring L-amino acids
  misc_feature (51): Xaa equals any of the naturally occurring L-amino acids
  misc_feature (61): Xaa equals any of the naturally occurring L-amino acids
CAVFSEWLLSLSNILLRFLKSFHGLIANFFLLLNDIPLYDVPQXHLSILLXKFRLLLSFAX

SEQ ID NO: 174 - protein, 69 aa, Homo sapiens
  misc_feature (42): Xaa equals any of the naturally occurring L-amino acids
  misc_feature (47): Xaa equals any of the naturally occurring L-amino acids
  misc_feature (65): Xaa equals any of the naturally occurring L-amino acids
GHVVVRQLKVTQSLLATFRNFTKDKSLISRETGNGVQHLHKXLSAIXQTRRKENGKRKRSAFHNXANCF

SEQ ID NO: 175 - protein, 70 aa, Homo sapiens
  misc_feature (53): Xaa equals any of the naturally occurring L-amino acids
VTKNKSNRSSTYWAALYILEQHYDHDSRQNLAESWCDKLSRAFIVTRREHNTXAQLKLWAHLGFLGRQEQ

SEQ ID NO: 176 - protein, 51 aa, Homo sapiens
DIIFILSYWQRLKRFVNILNQQNSGETGTLRAEDKLVPSLWKGDFGQLTVK

SEQ ID NO: 177 - protein, 49 aa, Homo sapiens
  misc_feature (20): Xaa equals any of the naturally occurring L-amino acids
LMLIPNTSKRFVKVQVFLHXESLCGYQNVNPSNLRQVLVNLENFGRVGR

SEQ ID NO: 178 - protein, 82 aa, Homo sapiens
  misc_feature (35): Xaa equals any of the naturally occurring L-amino acids
  misc_feature (66): Xaa equals any of the naturally occurring L-amino acids
ELRTESPAIPSRPGMGNGVKEGPVRLHEDAEAVLXSSVSSKRDHRQVLSSLLSGALAGALAKTAVXPWTEPKSSSKCLQKDF

SEQ ID NO: 179 - protein, 53 aa, Homo sapiens
ISLNTSCLLATSMLLFYVARRATMRHPQLPGVKTEGHSASPLGFEISESGNIE

SEQ ID NO: 180 - protein, 40 aa, Homo sapiens
  misc_feature (5): Xaa equals any of the naturally occurring L-amino acids
  misc_feature (12): Xaa equals any of the naturally occurring L-amino acids
  misc_feature (17): Xaa equals any of the naturally occurring L-amino acids
  misc_feature (23): Xaa equals any of the naturally occurring L-amino acids
NLLIXPRLPPKXINSSXENIPLXAFKNIQSNRFPLISYEV

SEQ ID NO: 181 - protein, 58 aa, Homo sapiens
AIKFQLSRAESISFIDSANINWASLLRPSIILGGDLAVNKIKQQKPFLHGACLQKKKK

SEQ ID NO: 182 - protein, 66 aa, Homo sapiens
PTRPYLFIFEMEPHSVAQAGGCSEPITHHCTTAWVAERHSVSKKRKVTFYKYGAENVIFKFWKKFY

SEQ ID NO: 183 - protein, 27 aa, Homo sapiens
  misc_feature (2): Xaa equals any of the naturally occurring L-amino acids
DXVLYRTISEDTFLHPFLSSNVLRAGL

SEQ ID NO: 184 - protein, 81 aa, Homo sapiens
PLITHEALSPQGPLTSQHWFSDLVFAITLQGGWALAVTPVIPALWEAEVGGSLEPRCFETSQGNKARPLSLKKKKKTDAWV

SEQ ID NO: 185 - protein, 62 aa, Homo sapiens
  misc_feature (19): Xaa equals any of the naturally occurring L-amino acids
  misc_feature (53): Xaa equals any of the naturally occurring L-amino acids
SKQEFPIVCSFRISCLMAXMAGCSFSILVWQNLEPIIVYLGNEYAIHRNFPVXNRILTGVEL

SEQ ID NO: 186 - protein, 54 aa, Homo sapiens
QAVDSRVQAGKHKINLKHLKVPINKERHRKKTWACQKDIGVRINVFPMAKDRGI

SEQ ID NO: 187 - protein, 78 aa, Homo sapiens
  misc_feature (50): Xaa equals any of the naturally occurring L-amino acids
  misc_feature (51): Xaa equals any of the naturally occurring L-amino acids
AGVQWCGLGSLQSPPPGLERFFCLSLPSSWDYRRLPPRPVDFCSFSRDGXXTMLARLILELLDLKWIRLPRPSKVAGD

SEQ ID NO: 188 - protein, 135 aa, Homo sapiens
  misc_feature (118): Xaa equals any of the naturally occurring L-amino acids
  misc_feature (123): Xaa equals any of the naturally occurring L-amino acids
DPRVRRAETVSPPTVCTIPTVVGRNVIPRITTPHNPAQGQPHLNGMSNITKTVTPKRSHSPSIDGTPKRLKDVEKFIRLESTFKDPRTAEERKRKSVDAIGGESMPIPTIGYITQKEXTQLKXYQIPPSPVSSKQ

SEQ ID NO: 189 - protein, 74 aa, Homo sapiens
FWCGVWKCFNCFNILSDWVNVIDHLLSLLYFGMSFDSSIKCFGNLSILLHYLEKNIAYSYRYRLFLESLKKIRQ

SEQ ID NO: 190 - protein, 67 aa, Homo sapiens
HFERPRQAYCLGSGVQNQPGQHGETLSLLKYKKLAGRGSVHLWSQLLGRLRQENRLSPEGGGCSEPR

SEQ ID NO: 191 - protein, 128 aa, Homo sapiens
ALISNNYHDMCYLCAYCCTAFFGFLTRATAEQKHFSLVWHLMNLINVCYGKSIPLYNFMGEAMCKSEFKKKEKKKPCAELLPTQYIIYMPEMAKAAICQGLQKHEEAGMEINTLVVCNVFKVGVFNDT

SEQ ID NO: 192 - protein, 38 aa, Homo sapiens
EKKKGKQIYLYQFGIKRFVCIDFLLKIEEIGGGSFSEI

SEQ ID NO: 193 - protein, 115 aa, Homo sapiens
  misc_feature (7): Xaa equals any of the naturally occurring L-amino acids
  misc_feature (13): Xaa equals any of the naturally occurring L-amino acids
  misc_feature (57): Xaa equals any of the naturally occurring L-amino acids
  misc_feature (85): Xaa equals any of the naturally occurring L-amino acids
  misc_feature (86): Xaa equals any of the naturally occurring L-amino acids
  misc_feature (87): Xaa equals any of the naturally occurring L-amino acids
  misc_feature (94): Xaa equals any of the naturally occurring L-amino acids
  misc_feature (95): Xaa equals any of the naturally occurring L-amino acids
  misc_feature (96): Xaa equals any of the naturally occurring L-amino acids
  misc_feature (102): Xaa equals any of the naturally occurring L-amino acids
  misc_feature (110): Xaa equals any of the naturally occurring L-amino acids
  misc_feature (111): Xaa equals any of the naturally occurring L-amino acids
  misc_feature (113): Xaa equals any of the naturally occurring L-amino acids
GNLGSLXPPPPGXKQFSCLSLPGSWDCRRAPPHPADFFVFLVEMGFHHVGQAGLKLXTSSDPPASASQSAGITGVSHCAQSGLFXXXFTFNLSXXXRMDCAXRVTPKSPXXKXRS

SEQ ID NO: 194 - protein, 72 aa, Homo sapiens
  misc_feature (50): Xaa equals any of the naturally occurring L-amino acids
  misc_feature (53): Xaa equals any of the naturally occurring L-amino acids
STDVIISLEVWPSWKLCGSHTYNKTSVKKKKTLSVVLLRFLFTLLIFPFXWLXFLRPSLTLSLRLECMAKSQ

SEQ ID NO: 195 - protein, 39 aa, Homo sapiens
  misc_feature (23): Xaa equals any of the naturally occurring L-amino acids
ACVEESLGRKKTLKFYSSMVVVXIYLVFNSEECIPSVIN

SEQ ID NO: 196 - protein, 103 aa, Homo sapiens
  misc_feature (7): Xaa equals any of the naturally occurring L-amino acids
  misc_feature (74): Xaa equals any of the naturally occurring L-amino acids
  misc_feature (76): Xaa equals any of the naturally occurring L-amino acids
  misc_feature (88): Xaa equals any of the naturally occurring L-amino acids
DVPTQWXHEIAYQYGKNVGIAFQLIDDVLDFTSCSDQMGKPTSADLKLGLATGPVLFACQQFPEMNAMIMRRFXLXGDVDRARQYVLXSDGVHKQPTSPSSTA

SEQ ID NO: 197 - protein, 85 aa, Homo sapiens
  misc_feature (5): Xaa equals any of the naturally occurring L-amino acids
  misc_feature (53): Xaa equals any of the naturally occurring L-amino acids
  misc_feature (54): Xaa equals any of the naturally occurring L-amino acids
  misc_feature (68): Xaa equals any of the naturally occurring L-amino acids
  misc_feature (79): Xaa equals any of the naturally occurring L-amino acids
LPSGXQNSTCKNQLPRQKMIRCHFWVTRKGHRISLNFGTDPHILGPEVCPESXXWLCLAVEPSSLAVXRHGQGKGEFCXYPSHLR

SEQ ID NO: 198 - protein, 54 aa, Homo sapiens
KTVPLQWSFPKTVEQSSKSVCPILTIFKKHKGDMRKTDAEMKILTDILLISQVV

SEQ ID NO: 199 - protein, 34 aa, Homo sapiens
  misc_feature (21): Xaa equals any of the naturally occurring L-amino acids
CARLNFPSAEITGVSHHVRPXFSYACIITIKFNL

SEQ ID NO: 200 - protein, 34 aa, Homo sapiens
  misc_feature (28): Xaa equals any of the naturally occurring L-amino acids
FCLSRYLDGSGRHTTHQVTFLSEPPAPXTVSVQR

SEQ ID NO: 201 - protein, 67 aa, Homo sapiens
ETYSRLYHASWQLEPKSLDYLLNAVFLDCKLKIISPQRLWNPGDRLLTQPTSDRKPAMPLCSLTSDL

SEQ ID NO: 202 - protein, 76 aa, Homo sapiens
HSKNKFPLSFGIKRELKYSGFSYKLELPGAELLQLCILNSSLDILKAIYLKIGLRHRNMRQKENMCLNSLREFGIV

SEQ ID NO: 203 - protein, 145 aa, Homo sapiens
EPMMSPDERRKKTRCLRRPKGRGCQEPWRANSSQPPWCKVPRGEEFWSSAYLERCLNSEPGIVSNSRRSGNRLFRCPGALQTNKQQKVNGGCEGRELEAGSGKRGSCGRQGGPGGDANIRESPGHSSVWRTHCSKCSSLQMVRRW

SEQ ID NO: 204 - protein, 84 aa, Homo sapiens
GQHQAEVEEGVAVGDAVLLVVKGPALTGCHLLLLLCGVYIGGHSSVCIRLFTCRWSEERRLMKRVHRRKMMRPTMLGASHHWVS

SEQ ID NO: 205 - protein, 51 aa, Homo sapiens
  misc_feature (23): Xaa equals any of the naturally occurring L-amino acids
  misc_feature (38): Xaa equals any of the naturally occurring L-amino acids
ASPTVGANGASALLHREMGENYXSPPGTHMPSTDWIFXPYPLVLPCCMKSC

SEQ ID NO: 206 - protein, 55 aa, Homo sapiens
  misc_feature (24): Xaa equals any of the naturally occurring L-amino acids
  misc_feature (54): Xaa equals any of the naturally occurring L-amino acids
QIGYSINLGAISQITFTSEDFLNXCNRGDFPFITVHFHSPLPGSSLKPPGICFXG

SEQ ID NO: 207 - protein, 51 aa, Homo sapiens
LVAEGQKFAMTFGCIQGWRGRFGESSFKEKMQNLITRSWGASQGLGKGLHK

SEQ ID NO: 208 - protein, 99 aa, Homo sapiens
  misc_feature (27): Xaa equals any of the naturally occurring L-amino acids
  misc_feature (96): Xaa equals any of the naturally occurring L-amino acids
PLTTPNILASHSPEYLGLEPGDLAPSXAGKVINAQCGLWILPTHSPPTCQIICWQIPGLIAFPLSVFQCIPLNNKGFKRKHNPGTIVILEKLPVRXGFM

SEQ ID NO: 209 - protein, 69 aa, Homo sapiens
  misc_feature (2): Xaa equals any of the naturally occurring L-amino acids
IXKTLGTQPTQLSHFKSEGSIAPDYLPKIIQERRQESQIPVFFLVLNIAPFDKFWISFLLYFSTLADLF

SEQ ID NO: 210 - protein, 47 aa, Homo sapiens
  misc_feature (10): Xaa equals any of the naturally occurring L-amino acids
LIVPTEPPCXRWWRAGGPGETQAEEEKCETRAGWRWVRDFPGSCPSA

SEQ ID NO: 211 - protein, 98 aa, Homo sapiens
  misc_feature (2): Xaa equals any of the naturally occurring L-amino acids
  misc_feature (82): Xaa equals any of the naturally occurring L-amino acids
EXPLVELGSPNWQAVYSFAVQLRPRIQRAASLLRGMGSERRVFYLDSMRSRLQTGPQEKMKPISCNSWRNGGYMCRWKTDAXTSFCLLFPVQTSESPL

SEQ ID NO: 212 - protein, 50 aa, Homo sapiens
  misc_feature (8): Xaa equals any of the naturally occurring L-amino acids
KLLINELXSARWKVMKAWCHQVALGPICNIPLQKAYTWKCKTCGKAIYSG

SEQ ID NO: 213 - protein, 50 aa, Homo sapiens
  misc_feature (49): Xaa equals any of the naturally occurring L-amino acids
FGRAGIQTASSWVRTSCNMHMGRCIAGCIDNWPRAWQHSSRLSWRLNSXN

SEQ ID NO: 214 - protein, 106 aa, Homo sapiens
  misc_feature (38): Xaa equals any of the naturally occurring L-amino acids
  misc_feature (93): Xaa equals any of the naturally occurring L-amino acids
  misc_feature (97): Xaa equals any of the naturally occurring L-amino acids
REQPSPLGLREEKTEKERGNSEEVPQGGETSEGWLWLXGNMLPVPCWRINLLEVPPRQATGAESCHGGECCWDPCRTKGDRRKRPFSSSSLVXPFQXPILGSSWQG

SEQ ID NO: 215 - protein, 53 aa, Homo sapiens
  misc_feature (31): Xaa equals any of the naturally occurring L-amino acids
RQVGSLELREFETRLGNIVRTSSLKLKKIKXTRKKPKNMPSGISLWLKWAAEG

SEQ ID NO: 216 - protein, 40 aa, Homo sapiens
  misc_feature (2): Xaa equals any of the naturally occurring L-amino acids
FXQGCGHPPNPFMVLAPSLARSIKKHFIAKRFCRTGKTQV

SEQ ID NO: 217 - protein, 37 aa, Homo sapiens
  misc_feature (27): Xaa equals any of the naturally occurring L-amino acids
REHLASCDPSTLASQSIGITGESTGWXKYLYLPDMIC

SEQ ID NO: 218 - protein, 50 aa, Homo sapiens
TILVLFLRPFLYVHEFKNKILIILTFIFLFPIIWDKYFKLSHNIQNGIAA

SEQ ID NO: 219 - protein, 48 aa, Homo sapiens
NLGGQSKTLSQKKCIHIYIYLPQYIFSYTCLVFTKETKNKNQNIRHTK

SEQ ID NO: 220 - protein, 23 aa, Homo sapiens
TDLCSKRVVGKPRVFLGSQDLSH

SEQ ID NO: 221 - protein, 66 aa, Homo sapiens
  misc_feature (40): Xaa equals any of the naturally occurring L-amino acids
  misc_feature (42): Xaa equals any of the naturally occurring L-amino acids
IRQRLCGAEEKAKLPCICLVPAKPQVHPSPEQDARRALPXRXHVESSEVRGCGLHLRDHLPGRSRR

SEQ ID NO: 222 - protein, 62 aa, Homo sapiens
  misc_feature (19): Xaa equals any of the naturally occurring L-amino acids
RFFLMVKPCICPLCSASSXVLEQDKLGKGIVFGCWPAPEPYFPVLTFCKQTVVPAQALGLGL

SEQ ID NO: 223 - DNA, 307 bp, Homo sapiens
ggggtgcccccctaaagcaaatacagcttggattacaacactcaagtcctttcatatatatggaaagccttcccaagaaagatgagaaacaagccctgacagtgaagacgatgataaatacctaactcctcaatgcccagatacccaagaacatctactagcgttagcaccatccagaaaaacattacctcaccaaatgatttaaataagttaccagggaccaatccttaagaaacagagatgtgacctttcagacagaattcaaaatagtgaggaaactcagagaaattcaagataacaaagagaa

SEQ ID NO: 224 - DNA, 116 bp, Homo sapiens
gctaaggtaggagaatcgcttgaacctgggaggcagaggttgctgtgagccaagatcgcgccactgcactccagcctgggcaacagagcaagactccatctcaaaaaaaaaaaaaa

SEQ ID NO: 225 - DNA, 177 bp, Homo sapiens
ccccatctctactaaaaatacaaaaaattagctgggcgtggtggcaggcacctgtagtcccagctactcaggaggctaaggcaggagaatggtgtgaacccgggaggcggagcttgcagtgagccgagatcgcaccactgcactccagcctgggggacaaagggagactccatctca

SEQ ID NO: 226 - DNA, 87 bp, Homo sapiens
gcagaatttgaaatgctcttgggtcatagggatgccctcttgagctttgtcactgccattagaactttatctagctttattttaggt

SEQ ID NO: 227 - DNA, 430 bp, Homo sapiens
aggcttattaggaagaggaaattcccgcctaataaattttggtcagactggttgatctcaaaaccctgtctcctgataagatgtcaatgacaatggtgcccaaaacttcattagcaattttaatttcgccccggtcctatagtcctgtgatctcgccctgcctccacttgccttgtgatattctattaccttgtaaagtacttgatgtctgtgacccacacctattcgcacactccctctccttttgaaactccctaataaaaacttgctggtttttgcggtttgtggggcatcacggaacctaccgacatgtgatgtctcccctggatgcccagctttaaaatttctctcttttgtactttgtccctttatttctcaagctggccgatgcttaaggaaaatagaaaagaacctacgtgagtatcggggc

SEQ ID NO: 228 - DNA, 836 bp, Homo sapiens
cactaggagcatttgctgtattctcccttttgtatattgggtctctggaagcctacagcgtggttagagctgactgaatattcttagatgtgtggcacatcctacgtgtggctgggtcctatggatagttttgcaggccatgatgtgcagtgtccctttagcagtcattaactcacagtgagttatcaatgggtgttagttctctgtgggtctgacaacttagtatagtgaaaagagtgctggcctgtggctgaacatgctggagaagagcttgcctggccacagggacacagccacgcagatccagcatgtgtctcccatgtgccaagtggagcccccagccaagaaggcagccacactagcagagggtgacaaggacaatgacattgacctgtttgtcagcgacaatgaggaggaagacaaggaggcagcccggctgtgggagaagtggctgaggtggtatgtggagaagaaggccaagaagactgcgttggtggtcaagtcctccatcccgctggacatcaagccttgggacaatgagaccaatatagcccaattggaggcctgtatgcgcttcatccagctggacgggctggtctaggggggcctccaagctggtgcccatgggctacggtatccggaagctgcagattcagtgtgtggtgggggacgacaaggtggggacaaactttctggaagaggagattaccaagtttgagagcgtgtgtagagtgtcgatgttgcagctttcaacaaggtctgaagccttagagtgtgtgtgcgtgcatgcgcacgtgtgcaagtgtgtgaggccctgccactattaaaaactgaga

SEQ ID NO: 229 - DNA, 488 bp, Homo sapiens
ctttgttaaataactaattctcatttcaagaaacagctcttgacttgctatttagccctgggagagactggatgacttatcataggaaatcaggagacgtggaaactaggtgttatttgatttcaacaatccataaatacaggtgtgcctaggagcactccattttcaagtggacatagtatttatgaaatcaggcttcaggatgtcctgaaggcataagtcagtggttcacactcatggtgtatccactgcagaagtcttactcttacaggctatgttatgacctctccatctacagacttaaagtttggcgagaagtttgctatggccagttgaccaacaggacattttaagcctgacttacagatacttttatctaacctgctggcaccagacgtagactgctgcagcaagtagaactttaagcagttcttcctctgggccacttgctgagaagcagagaaaacctaaaataagaatttatatca

SEQ ID NO: 230 - DNA, 205 bp, Homo sapiens
atcttggctcactgcaacctctgcctcctgggttcaagcgattctcctgcctcagcctccctagtagctgggactacaggtgcacaccaccacgcccagctacttcttgtatttttagtagtgacagggtttcaccatgttggccaggatggtctcgatctcttgacctcgtgatctgcctgcctcggcctcccaaagtgctggg

SEQ ID NO: 231 - DNA, 315 bp, Homo sapiens
ggctgggcgcggtcgtcacgcctgtaatcccagcactttgggaggccaaggcgggcggatcacgaggtcaggagattaagaccatcctggctaacatggtgaaaccccgtctctactgaaaatacaaaaaaattagccgggcatagtggcgggcgcctgtagtcccagctactcaggaggctgaggcaggagaatggcgtgaacccgggaggcggagcttacagtgagccgagatcacgccactgcactccagcctgggtgacagagcgagactctgtctcaaaaaaaaaaaaaaaagaactataaaatacatac

SEQ ID NO: 232 - DNA, 431 bp, Homo sapiens
agaccgacgcagatatccaggcattcttcatgagcatagacagtctgtgtaagaagtactccagggaaacctcccaggtgagctgtgaggggtgtggcttggttccgtgatgagccaggtgcactatcccgagaccatggagctatgaggggtgtgcttggttctgtgatgagccaggtgcactatcccgagaccatggagctgtgaggggtgtgcttggttctgtgatgagccaggtgcactatcccgagaccatggagctgtgggagttgtgcttggttctgtgatgagccaggtgcactatcctgagaccgtggagctgtggggggtgtgcttggttccgtgatgagccaggtgcgctatcccgagaccgtggagctgtggggggtgtgcttggttccgtgatgagccaggtgcgctatcccgagacc

SEQ ID NO: 233 - DNA, 727 bp, Homo sapiens
ttgtttgttttttgagatggagtcttgctctgttgcccaggctggagtgcagtggcatgatctcggctcactgcaacctccacctcccgggttcaagcgattcttctgcctcagcctcccaagtagctgggattacaggcacctgccatcacgcccaggtaacttttgtatttttgatagagatggggtttcaccatgttggccagcctggtcttaaactcctgacctcaagcgatctgcccaccttggcctcccaaagtgctgggatgacaggcgtgacgtcttttctttggactgctcaagcgattctagctcacggcagctccatgcctaggacagctgtcgcctagtgttttgtgctaatgtggtcctggctggggaaagtgagggaaggccagaggtgcagggaggtgaggcagggcatcctgaaggcacttgtgaaggaagttgggagcgtctgcatgagggcttgtaaccaaatgctgtttcttttgcccaggctggagtgcagtggcgtaatctcggctcactgcaagctctgcctcctgggttcatgccattctcctgcctcagcctcctgagtagctgggactacaggtgcccgtcaccacgcccggctaatttttttatatttttagtagagacggggtttcactgtgttagacaggatggtctcgatctcctgaccttgtgatccgcccgcctcggcctcccaaagtgctgagat

SEQ ID NO: 234 - DNA, 418 bp, Homo sapiens
cagacattagaattaccaatgtaaactttatatctaaaaccaaaatcaattacaaaggatcattattttccaaagtagatacttttttttagtgctgttcagtttttctgaagcttatctttgttcacaaggattgttagcacttccaccaaatcagtgtttagaaaccttaaataatttaacgtctgacttgccagtacattattagagaaacaattccaagaccaaaacatgttgaataagcaggagatatacaccaatttgattttaaaatggacagctttcctgtctctggctctctctcatgttgccttaaacacacatatgctgaagaaatcatatacagatacttgcatgcatttaataaactatccaataagtggtgcttttaataaattctgaatacaatcaattaaaa

SEQ ID NO: 235 - DNA, 417 bp, Homo sapiens
cagacattagaattaccaatgtaaactttatatctaaaaccaaaatcaattacaaaggatcattattttccaaagtagatactttttttagtgctgttcagtttttctgaagcttatctttgttcacaaggattgttagcacttccaccaaatcagtgtttagaaaccttaaataatttaacgtctgacttgccagtacattattagagaaacaattccaagaccaaaacatgttgaataagcaggagatatacaccaatttgattttaaaatggacagctttcctgtctctggctctctctcatgttgccttaaacacacatatgctgaagaaatcatatacagatacttgcatgcatttaataaactatccaataagtggtgcttttaataaattctgaatacaatcaattaaaa

SEQ ID NO: 236 - DNA, 1743 bp, Homo sapiens
aatcatccaatatctgatctcagacgaaaaggaattaaattacaatttgataacagaaagatagccggaaaatcactgaatacttagacattaaataacacatttctttttttttttttttttttttaagacagagtctcactctgtcacccaggctggagtgcagtggcgcgatcttggctcactgcaacctccacctcccaggttcaagctattctcctgcctcagcctcccgagtacctgggactacaggtgcacaccaccacacctggctaatttttgtatttttagtagagacggggtttcaccatgttggccaggctggtcttgaactcctgacctcaggtgatccgcccaccttggcctcccaaagtgctgggattataggtgtgagccacagcacccagcccaaaatgttttcaaaagacatatatgatgaagactgttatccaaaatacacaaagaactcttaaaactcaacaaaaagagaggtgggtatgggtgctggctgaggtcactcagtgctgaccatcctcttctcaaagccatgtctctaagacatcatggtgaaggtgaaggccagagtaaatagatttgggccatattgggcacctggtcaccagggctgcttttaactctagtaaagtggatattgtcaccatcaatgacccttcattgacctcaactacatggtctgcatgttccagtatttctacccatggcaaattccaccacaccgtcaaggctgagaatgggaagcttgtcatcaatggaaatcccatcaccatcttccaggagcaagatcctaccaaaatcaaatggggtgatgctgaagctgagtatgccgtggagtccactggcatcttcatgaccatagagaaggctggggctcacttaatgggggagccaaaagggtcatcatctctaccccctctgctgatgcccccatattcataatgggcatgatccctgagaagtctgaaaacagcctcaagatcatcagcaatgccttctgtaccaccaactgcttaatcccccggccaagcccatccatgacaactttggcattgtggaaggacttgtgaccacaatccatgctgccactcctgcccagaagactcgatggcctctgtgggaaactgtggcatatgtctgtggggctctccagaacatcatccctgcatctactggtgttgccaaggctgtgggcaaggccatccccgagctgaacaggaagctcactagcatggccttccgtgtccttctgcaaacgtgttggttgtggacctgacctgccatctggagaaacctgccaaatatgatgacatcaaaaaggtggtgaagcaggcgtcagagggcccctcaagggcatcttgggctacactgaacaccaggttgtttcctctgactttaacagtgacactcactcttccactttcgatgctggggctgccattgccctcagtgaccactttgtcaagctcatttcctcgtacaacagtgaatttggctacagcaacagggtggtggcccatatggcctccaaggagtaagactgctcgacaaccagccccagtgagagcacaagaggaagaaagagaccttcagcttctgggcagtccctgccatgctcagtcccccaccacactgggaatctcccctcttcacagtttccatgcagaccccacaaagagctctatcttgtcgtgtaccatcaataaagtcctctgtactcaaaaaaaa

SEQ ID NO: 237 - DNA, 1746 bp, Homo sapiens
aatcatccaatatctgatctcagacgaaaaggaattaaattacaatttgataacagaaagatagccggaaaatcactgaatacttagacattaaataacacatttctttttttttttttttttttttaagacagagtctcactctgtcacccaggctggagtgcagtggcgcgatcttggctcactgcaacctccacctcccaggttcaagctattctcctgcctcagcctcccgagtacctgggactacaggtgcacaccaccacacctggctaatttttgtatttttagtagagacggggtttcaccatgttggccaggctggtcttgaactcctgacctcaggtgatccgcccaccttggcctcccaaagtgctgggattataggtgtgagccacagcacccagcccaaaatgttttcaaaagacatatatgatgaagactgttatccaaaatacacaaagaactcttaaaactcaacaaaaagagaggtgggtatgggtgctggctgaggtcactcagtgctgaccatcctcttctcaaagccatgtctctaagacatcatggtgaaggtgaaggccagagtaaatagatttgggccatattgggcacctggtcaccagggctgcttttaactctagtaaagtggatattgtcaccatcaatgacccttcattgacctcaactacatggtctacatgttccagtatttctacccatgacaaattccaccacaccgtcaaggctgagaatgggaagcttgtcatcaatggaaatcccatcaccatcttccaggagcaagatcctaccaaaatcaaatgggatgatgctgaagctgagtatgccgtggagtccactggcatcttcatgaccatagagaaggctggggctcacttaatgggggagccaaaagggtcatcatctctaccccctctgctgatgcccccatattcataatgggcatgatccctgagaagtctgaaaacagcctcaagatcatcagcaatgccttctgtaccaccaactgcttaatcccccggccaagcccatccatgacaactttggcattgtggaaggacttgtgaccacaatccatgctgccactcctgcccagaagactcgatggcctctgtgggaaactgtggcatatgtctgtggggctctccagaacatcatccctgcatctactggtgttgccaaggctgtgggcaaggccatccccgagctgaacaggaagctcactagcatggccttccgtgtccttctgcaaacgtgttggttgtggacctgacctgccatctggagaaacctgccaaatatgatgacatcaaaaaggtggtgaagcaggggtcagagggccccctcaagggcatcttggggtacactgaacaccaggttgtttcctctgactttaacagtgacactcactcttccacttttcgatgctggggctgccattgccctcagtgaccactttgtcaagctcatttcctcgtacaacagtgaatttggctacagcaacagggtggtggcccatatggcctccaaggagtaagaatgttggacaaccagccccagtgagagcacaagaggaagaaagagaccttcaggttctgggcagtccctgccatggtcagtcccccaccacactcgggaatctcccctcttcacagtttccatgcagaccccacaaagagctctatcttgtcgtgtaccatcaataaagtcctctgtactcaaaaaaaa

SEQ ID NO: 238 - DNA, 733 bp, Homo sapiens
atagtaaattatgatccttaaatatttgagagtcaggatgaagcagatctgctgtagacttttcagatgaaattgttcattctcgtaacctccatattttcaggatttttgaagctgttgaccttttcatgttgattattttaaattgtgtgaaatagtataaaaatcattggtgttcattatttgctttgcctgagctcagatcaaaatgtttgaagaaaggaactttatttttgcaagttacgtacagtttttatgcttgagatatttcaacatgttatgtatattggaacttctacagcttgatgcctcctgcttttatagcagtttatggggagcacttgaaagagcgtgtgtacatgtattttttttctaggcaaacattgaatgcaaacgtgtatttttttaatataaatatataactgtccttttcatcccatgttgccgctaagtgatatttcatatgtgtggttatactcataataatgggccttgtaagtcttttcaccattcatgaataataataaatatgtactgctggcatgtaatgcttagttttcttgtatttacttctttttttaaatgtaaggaccaaacttctaaactaattgttcttttgttgctttaatttttaaaaattacattcttctgatgtaacatgtgatacatacaaaagaatatagtttaatatgtattgaaataaaacacaataaaattaacacttgatccagaa

SEQ ID NO: 239 - DNA, 476 bp, Homo sapiens
gattacaggcacccgccaccacgcccagctgagttttgtatttttagtagaaatgaggttttgtcatgttggctaggctggtctcaaactcctgccctcaagcagtccaccctcctcggcctcccaaagtgctggcactacaggcgtgagccactgcacctggcctggatataatcaagttctttattcttatcttcatgttgagtaggctgaggaaattaactggggaaattttactgatacctgagtcctaccctgggcttactgaaattaattttcggaattgaggcctattaatttatttttaaatgtttcccaggtggttctaaggttgccagtctggcattgcatttggcaaccactaaattaaagcattttgttttatattttaagttactacatttcatatagtgcataattaagtttcggagagtaaaaagtgttgttattctctagccacccgtttttcaactgtg

SEQ ID NO: 240 - DNA, 26013 bp, Homo sapiens
tgtgttaaatgggcttgccaacaatatggatgatttgaagataaacaccgatattactggtgctaaagaagaactcctagatgacaacaattttatctcagacaaagagagcggagttcataagccaaaagattgtcaaacatcatttcagaaaaataatacgttgactctgcctgaagaactgtcaaaggacaaatctgaaaacgccttaagtggaggccagtctagtctatttatacatgctggtgctcctactgtttctagtgaaaactttatcttgcctaaaggagctgctgttaatggaccagtttcacactcctccttaactaagacttccaatatgaataaaggcagtgtttcattaaccactggacagcctgtggatcagccaacaacagaatcttgttcaactttgaaggtagcagctgatcttcagctgtctacaccacagaaagcaagtcaacaccaagttttatttttgttatcagatgtagcacatgctaagaatcccacccattccaataaaaaactacctacctctgcttcagttggttgtgacattcagaattcagtagggagtaatataaagtcagatggcactttaataaatcaagtagaggtgggtgaggatggtgaagatttattggtgaaagatgattgtgtcaatacagtaacgggaatttcctcaggtacagatggatttaggtcagaaaatgatacaaactgggatccccaaaaagagttcattcaatttcttatgactaatgaggaaacagtagataaagctccacctcattctaaaataggtctagaaaaaaaaagaaagcgaaaaatggatgtaagcaagataactcgttataccgaggattgctttagtgattctaattgtgtacccaataaatcaaaaatgcaagaagtagactttctagaacaaaatgaagagctacaagcagtagactcacagaaatatgcattatcaaaagtgaagcctgaatcaactgatgaagacttagaatctgtggatgccttccaacatctaatttataacccagataagtgtggagaagagagttcacctgttcatactagcacttttctttcaaataccttaaaaaagaaatgtgaagagagtgattctgagtcacctgctactttcagtaccgaagagccatcattctacccctgtacaaagtgcaatgtgaattttagggagaagaagcacctccacaggcatatgatgtatcatttagatgggaatagtcactttcgccatcttaatgtcccaaggccatatgcttgtagagaatgtggacggacatttcgagatcgcaattcacttctaaaacatatgattattcaccaggagagaagacagaagttgatggaggaaattcgtgaattgaaagaacttcaggatgaaggaagaagtgcacgattacagtgtcctcagtgtgtgtttggtaccaattgccctaaaacatttgtgcaacatgctaaaacccatgaaaaagataaaaggtactactgctgtgaagagtgtaacttcatggcagtgacagaaaatgaattggaatgccatcgaggcattgcacatggggcagtggtaaaatgccctatggtcacttctgatattgcccagagaaaaacacaaaaaaagactttcatgaaagactctgtagtaggatcatccaaaaaatcagctacctacatatgtaagatgtgtccttttactacttcagccaaaagtgttttaaaaaagcacacggagtacttgcattcatcatcatgtgttgattcatttggtagtcctcttggacttgataaaagaaaaaatgacatccttgaagaacctgtagatagtgatagcactaaaacattaactaaacaacagtcaaccacatttccaaagaactctgctttaaaacaagatgtgaagcgaacatttggatcaacctcacaatcaagtagtttttcaaaaattcataagcggccacacagaatacagaaagctcggaaaagcattgcccaatcaggtgtaaacatgtgcaatcaaaacagctctcctcataagaatgttacaattaaaagcagcgttgaccaaaaacctaagtatttccatcaagcagcaaaagaaaagtctaatgccaaggcaaatagccactatttgtatagacacaaatatgaaaactataggatgatcaaaaaatcaggtgaatcatatcctgtgcatttcaaaaaagaagaagctagttcattaaattctttacacctgttttcatcatcaagtaattctcacaacaattttatttcagaccctcataagcctgacgccaaaaggcctgaaagcttcaaagatcacagacgtgtagctgtaaagagagtaattaaggaatctaagaaggaaagttctgttggaggggaagacttggatagctatccagattttttgcataaaatgactgttgtcgttttgcaaaaacttaattctgctgaaaagaaagatagttatgaaacagaagatgaaagttcctgggataatgttgagttaggagactacactacacaggccatagaagatgaaacctatagtgatattaatcaagagcatgtaaatttattccctttatttaagagcaaagtggaaggtcaggagcctggagaaaatgctactcttagttatgaccaaaacgatggcttttattttgaatactatgaagatactggaagtaacaactttttgcatgagatacatgatcctcagcatttagaaactgcagatgcttcattgtcaaagcatagttctgtttttcattggactgatttgtctcttgagaagaaatcgtgtccttactgcccagcaacatttgaaacaggtgttgggttatcaaatcatgtcagggggcatcttcacagagcaggattaagctatgaagcccgtcatgttgtatcaccagaacaaatagccacaagtgacaaaatgcagcatttcaaaagaactggcacaggaacacctgttaaacgagttagaaaaggtaagttctccatggggatgatttgggctgataggtctgtgttctaattctgaagatttaaaagttttttttgaatttagtctttattagaatcataattttatgtttcagaattaactcattttagggtggtcagtttatataagaaagtctgatattactcttaaaaatttttttctagctatagagaagtctgaaaccacttctgaacacacttgtcagctctgtggtggttggtttgatactaaaattggattatcaaatcatgttagaggccacttgaaaagacttggaaagacgaaatgggatgctcacaaatctccaatctgtgttctgaatgagatgatgcaaaatgaagaaaaatatgaaaaaatcttaaaggcattgaacagtcgtcgtattattcccagaccatttgtagctcaaaaacttgcatcaagtgatgactttatatctcaaaatgttatacctcttgaagcataccgtaatggcctaaagactgaagctctgtcagtgtctgcatcagaagaagaagggctgaatttcttaaatgaatatgatgaaacaaaaccagaactgcccagtgggaaaaagaatcagtctcttacactcatagaacttcttaaaaataaaaggatgggagaagaaaggaattctgctatttctcctcaaaagatccataatcagacagcaagaaagagattcgttcagaaatgcgttcttccattaaatgaggatagtccgttgatgtatcagccacaaaaaatggacttgactatgcactcaggtaagaggacgtttatgactatgctatacacagtttaaatgcagttcaattatgccttctttaatggaatctatgtggaaaatactttctcacaatcttcctgtttaagctgctttttttttttacagagcacagattggttattctactgtcatttctgtataactcatcaattgatgctcattagcactgagttctctgtgcctcttttcttggtctgaatgtaaggtgagaacaaaagcagaagaaaaccacacacacacacaataaaaacaacaaacaaaaagctgatctgtaaaaataaaacttgctctggctggaggatggttgtggatgggaggttgatgttcaaaagcatagcattattgaaaaggcatacctctgtcatatttttgccagttctccaaggtgatcatgttttcaagatttagctgttggtttttccactgcttaggtaaaacaaaacagactcttaaagctgaatggattggtgtctgttgtgattaacccaaagaaacatctccctctccaattcctcattgtattgcggaatagtttggttttggagaacagttgtgaacataaaacatatttgtttggggttttaggttttaagatagtgctctaatggaacaggacagatgatttagcttagtgctggtgcaccaatagttttttccttttgaaaggaatattttgtatgtattggcaaataatgtggcagataaagtagccaaactttattcagtattgccaagtgtggtttatacttttagactagaaaaattttaagtgttttttctagatttctttttgaaggttaatgttgaaggtttatgtaaatggtctcatgattagagctctaagttgaatgtgtcagaggtaatagttaatggattaataacgactaacattactgtaaagtaatgttgtttatttgctttggggcagacattgtgatatcccgaatagttgtaatgcagttttgatttaaggaaagataactttgtattgtaagtggtctggaaagcagtttatcttgtatgagcttctgtttaatccggctttttctttcgaataaagagtctctgaaagtcaatagctttcaatattttttcagaagggtaaaacgcagggaagatgtgttagctgtgttgaccaaggggtagtatacttcagagatggaaagcatatttgtggctatcacagtaatgctgaagaaaccagttgaaatgtgttgggggagtgaggattgtctgagaagttaggagtttcttattgtttgaacatgtttttcctgtgatgactaagatgttagcttgttgatcatttatttagcacaaagattttagcaaaaaactttaaatcattaactttcattattgattgcgcattcagagtaatgaacataaaataccctaaataaaatgttgtgtctaacagctgttcagtggtgtgttttaccaccttttctcccagccttcatcagaaagcctaatttagtattgagacttttacggttttgtgggtaaaacactttaattaccactttgtcaactagactttttaattctttttattggtaatgttgtaagctttgaaacttctcaacagaaccgtgttgttcaaatcacaggattgtattgtagtaggtttaagaaataatctgcgtaacacagaaatctgcaagaaagtaataataggtgtatatccagaggagctcaaaggttcaagtcactcctcgtctacctttccaaagagcatgagttgactctaaatactaactacaaactaataacagttaacttaatttcccctccttattttaagttaacctatttcattgaacgttttgaaaaccatctttattgtggtgcttttctacactctttaagctaagaaaatttcactttttgaagtgagaactggattatagttttcttttgaatgataggtatgcctgtgaagcttagaacatgtgtgcattgcaatacgacgtttacaagtgctgttagcctgtccaaccacttacgcgcttatgcacgaaagaagagtgctggacttttgactggtacaggtatgtttgaacagatatcacagcaagtctgtttgatacaatacactttttttttccccaccagactggtgttaattcagatcatatttatagctttctttggtaagctgcatttgagtctgaatacccattgaatttcagcaacttgtaaactgttagatgtaattctaagcaagttaatctttttcttttggctcttattgacttaatttgggggaaaaaaaattaacccaagaggtgtggaactttgagtctaccttaatcccatttattttttagaatactatttttgatttttaaattgattttagattccagtaaaacacctctctttatagttctagtcgggctcagtggtgtgcccctatagtcccagctactcatgaggctggcaggaggatcacttgagctcaagagttagcggctataatgtgctatgattgtgcctgtgaatagtcactgcactccagcctgggcaacatagcataaaaatattgtagttctagcttggggaaatcctttattagaaaaggaaattatagggaaatttcaaaatgtagacttgattaggaaactaagcaaactaatgaattttcattagtctatagattagatctttgaaggggtgagccttaataatggcttgtgttgacaagcgaatagatttttcttttaatacttcttaaatatattaaggattaataaatttagctatgcacataagtgttaacatgcacatttctgtgttatttttggttggttagcccaaccttgcagatacctcttaatactgctcatctgtgaaaattttattagcttacttatatgtaatacgcttcttataacctacaaaatgctttgcactttcatttgtagtcttttaagctaccctgcttcagcaaatctcatttccctcacatcttaaaatataccctctttttgacatagatctacataaattcttttgcctaaaattctttccaatcattttatttctcttgctcttttttagatcactgcctcctgctttcttctagttgttttcccagcttttttgttcttcctcatgtcctagaacttagatccaatatgttcttgctttcaaaaaaccacttatatttatactagtgtctttcttctgcttctttgcattcttccttaacttgatatacaaatgaccagggatgaatgttgacaatttatattaaaaagagaggagtggggtgagttttagtctactggattaggcctcctactctgagattataatttttatataccctcacctttatcaggcttggcaagtgattgcagacattagaggtggggaacaataaaaataagagactatacaagtaggaaatcattattgttaccatacttgctaacttttattgaacatttactatgtgtcaggcactatgctatgcaatttacatgcataacatttaatctttacaacagccatacaagttgtaggtactggaattctcttaacgttttataggaaactaggacttaaagaacttaatttgctcaaacttacacagttaataagtagcaaggttgtaattcaaatcagggctatcttacctaatctttgtttttaatcactattctctaccttacacaggcggtctatttttgaatttcttatttttaaaataagaaattgaaataaaaataagcaatggaaaattctaaaatgaaggtgggtttgttcatttatttatttatttattttgagacggagtctcgctctgtcacccagattggagtgcagtggcgcgatctcggctcactgcaacctccacctccctggttcaagcaattcccctgcctcagcctcccgagtagctgggattacagactcatgccatcatgcctggcaaatttttttgtatttttagtagagatggggttttaccatgttggacaggctggtctcgaactcctgacctcaggcagtctgcccgccttagcctcccaaagtgctgggattacagccgagagccaccgcacccagcctgaaggtgggtttaaaatggggactattctggtgaagactgaataaataagagtctaattaaaaagagcagagatccaagaagtgcttaggcctaaattagactttagaggagttaatgttccattctgattattcaagcagattatgcaaatatccaataaggcaagatatctccagtccagattttattagtccattaaaaaaatgcttttacttcatctgaaaattctgcaaaacacaggattaattacttataaataactggtagtaaatctccatttaccaagaatgcacttatgaagattatctaaaaaatcttcattatcagagagaaaagtaatgtaggatgactgggaatatgtttaggtcctgaagaataaaagagggtgttattttaaaaatatgattaagtactaccaaaatattagaagtactaggaaatagaaagcgtgtgtttggcagtcctaggcaaagaaaaggaaaatgagaaactgaagaaagcctagggtcttattttccacacccagtagccacttttgagaaactttaaaaactaatgcttctttttcttggaaattctgaaacattttttccctcattaaaaaaaatcttcttgatcagtagagctatacagatgtctttgctgcttattcatgccaactaagaagttttttttcaagctttattaacttttctgttttccagatagagaattctgtattgtatttacaaactccacatactgattatcccccatatcaatatcactgttataaagcagtgttcctaaaaacctatggccctagaaggttccacttggttattataagtgattcattaattcatatgagtaacaggcatcatttttcaagaacacatgatcttttaatgaataaaatgcaaattcatttttataaaatcttaccttagtatatcacaaaattggaacaatgtaaagggaaagtagataggaataaagcctccctaaccatgtccagtatgtgtatttctagtttaagcagtcttaattcatgtagattttaagttgtgtggtccactcttgaatacaaagcttagataccctcagactaaatggtaaaggcctgcttttggttacctgtgatagaataaactttcaagccttcttagaagccacagctcctggtcttttctgtgggaactggtgaccttttgagggaagaaaaatatttcttctaacttataatctcttcaagtatcctgaatacactgaaaaggatatccctcttcttcccaaaatacctgtttactggtaacttaaatacttctaatgtgatggttctcaatctttactggggtcaccgacatctttgagaatttcatgaaagctgtgggccccatcccagaaacatgcacttatttgttctcagataaaaatttttgtgtgtatagactttgcgtatctcctgaaggctatcatcaatttgtctgatggcaaattgagaaaggagagatgccagaataaaaggaaagtagaaacagaactaggaatcagaagccttaagaagttcttttttttttaagagcagaagatgcttaaaatgcaagaattgcataatagcaaaactaattgtggggtcattatcttccctaatatttgtaaaaggaaccgatgggggaaataggaaagatttagaattgaagatttggaagaggtgggcagacttgggagagttaaattgtcataaaagaataatttcacagattaaagttttgcccagaactgtcccagtttatcttctgttgggtaggttcaaataaattgtttaataatttttctgtgtcttcacttgtagataatttatgaagctgttttacttcctttccccgatcaatctttatcaaaatagactagaatcaaagggtttattttatatcctatattgtaaatttaaggcagacttcttattcaagagtttattctagttatttatggaatgcagtaatggtaggggttttttttttttttgagattttgttctctttaatgttttacatgctcatacagatttttttctggttaattttccatacagtttaatgagaacattatatagttttcattaaatattgaaattttataatgtagcttatattaattacttctggactttttattttactgattagctttttttgtgcctaatgttttaattaaatgatgtatttttatgctagccatattaagaacatagttctattaagttattaatggagtgactatacatactggtttaccttgttgtcacacctaagtactagtgcctcttttactctcataagtgtcctggattgaatgataaattaatcatcctggttattaaaattgctaaagcatttaaaattaaggtaaagcatattctatcaacctaatctgcaatcaggaaaaaaaatatattttgaggtcaaaataagagtgaatttcaacaggtagggaaagggaaatacagagtagagagaatgttgttaaaggaagtagatctgtcagatgaatgccacaatgcttttctatggtagatagcatgttgttatcttttgtaaagaagaaacaatgatggtagcagtcagcattttaattgagactttattttatatcttgaccacatgtacaaacttacattaatacaaacacacaattccttgtgtactcacctaaatgtactttaatattttcttttttattatattctttgttgtgaaaaattaatgctggtcatgagccagtaaattgatttgctacccacttaagaagtcactatcatagattgaagacactgccctaactgcctctttctcttaggggttggtactgaccaatggtagtagtatcttagatgtcataactcttctgtggcagcaggtgaattttctatactcattctatccacatttttctctctagatcacttttgtaaatcaaatgctaacctctgggacttaaagtaattggaaatttctagttactcatttaaaattaatgcaagaaaaatatttttatatttgggaggggcttcatttcattatcttcagaacaattttgtgtgtgtgtgtgtgagacggagtttcactctagttgcccaggctggagtgcaatggtgcagtctcggctcactgcaacctctgcctcccaggttcaagtgattctcctggctcagcctcctgagtagctgggattacaggcacacgccatcacgcccggctaattttgtatttttagtagagatggggtttctccatgttggtcaggctggtctcgaactcctgactttaggtgatccacccgcctgggcttcccaaagtgctgggattacaggcgtgagccactgcacccagcccagaacactttcttgatacgttttggaagtaaagcccaattgttgctattctacaacaaatgacttatccatcataattatttgacttttctgatgaggtcaataccactagtgcaatatattaacgtttttaaaaaatcaagtcagtgttttatttttcataccatttacttttaagtgtaatcgtagtaggtttcttttgcctgttttcagctttaatgatataattggccacacaggactgtaacaagtactaatgaacatatagcacagtatcaagtgctgaatgggtttgtaagccactagaaaagtcattcttatgttgtggaaagtgctatgggagcactttctgatgtgatagaaaaaatagtattgtgaaagcttcccaatgtgcattaaattatttgttcattcatgagtgtcactgtagtgtcttttaaaaataatatagtattgcatgtttgaaaaattgcatgttttcatagtggttcattcagactgaaagagtgtaagtagaaaattttgatcttcttattaagattaaactccaaatgagcaaacttgcttctgcttaaagcaaactccttgacaattcttccagactgggctgaggagggtatgtgaaaagtatgagacatgtctctgctgtcagagaaattaggaaaggattgttgacaacatacataaaactatcaaaaattgaaaactatgcaagatagtatacaactaaatggcatattggctttaagtgttgtaggagttcaggttgattattttagtctaagcctccttttgagggcagctgggaattgagattccttttttttctgatgcccttactgtttgtctcattgaattagagcttgtaaaaaacagaaaaaataaataaataaaagtagttcatgctggtatgcttcttgtgactttttaaatgcaagagaacaacaaaaccagcagccatacaaaattttattcattcaacaaaagtttgagttcttgtaccaagactgttcatcgctgagccagtaaagatactgcactccagctgcataaacataatataacccagtgggaaaagatcaagtatgccattacagaagggtttatatggtttcagccagaccctgaagttgaaggatgcagtagagttttaggaagacgagatgaagtgtagaatatttcaggcagagaagaacatagtgtggacacaaagggatgaaatttggacttcaagtgtcaggagtggaacttggagttcaagtgtcagaagatttggttacagatgtttggtaaaattgtagtgccagaaaggtggggttggtgctttgaatgcttggtaaaaaaaattaggaagtcattaaaggatgttttaaaaataaggaggccgggcgtggtggctcacacttgtaatcccattactttgggaggctgaggcaggcacatcacctgaggtcaggagcgtgagaccatcatggtcaacatggtgaaaccctgcctctactaaaaaaaaatacaaagaactagccaggcgtggtggtatgcgcctgtaatcccagctattcaggaggctgaggcaggaggattgcatgaacccagaagctggaggttgcagtgagccgagattgtgccattgcattccagcctgggcaacaagagcaaaactcctcaaaaaaaaaaaaaaaaaatcagcccagtgtggtggtgcgcgcctgtaatctgagctactcaggaggctgaggcaggagaattgcttgaacctgggaggtgcaggttgcagtgagccaagattgcgccactgcactccagcctgggcgacagagtgagactccgtctcataaataaatacaaaaggaaaataggccaggtgccgtggctaacacctgtaatcccaagcactttgggaggccgaggcaggcggatcacctgaggtcaggagtttgagaccagcctggccaacatggtgaaactccgtctctactaaaaaatacgaaaaagtagccaggcgtggtggtgggcgcctgtaatcccagctactcaggaggctgaggcaggagaatcgcttaaacctgagaggtggagattgcagtgagctgagatcatgctgttgcactccagcctgggcaacagagcaagactccatctccaaagaaggaaggaaggaaggaaagaaggaagtgaaggagggaggaagagagggagggcagagagagagagaagaaaaataagggaatggtatggttaaacttatattttaaaaagcctttcatgagacagagaaaagatgggtctttatatttcttagctataacttatttctatagtattgttcttcattaagagcatatatgtgtatacatttatctgcacagtaacgtatcatttataagtgattagcaaggtaacgaattatctgagttgagtaaattctctaggtgactgaagaatagtcctttaactgttaataacttgatttttcctaaccattttggtggttattgctccaaaatgttgttcttatttttgccttgagtagcttggatataatttaatcgagtattttgggtaacccttatagatactctactaattgttttattattccagcaagaattaggctatttctccaccatacaaaaaaatgatcggctgattttttcactaattcaacaagcacttttttcacctccaactgtgctaagtatgcagagatacattggatcttacaatacagtagaagcacatatatgcataactgtaatacaagacaaattgttaagtgccattggagaggtatgcgtgaaatactgtggaatttcagagaaagaggaagacactttcagctagactaggaactcccaaggcttttggaattagcatttgaatggaccctgatgtatagctaactgaaatggaaatgggggtcggggtggggaagagaaatgcctgaaagagggagcaaggtggaacaatgtgggaagtttataggaaatactaggaagtaggaggtaagggaattgagttggactggtaaagtgagtcagatagatgacatagaacgctagtctaagatgttggaattaactttgtagtggggaactatttgaatgcagaatttgtgtaatgcttttgaaattgctttttaaataaaggatttggcagagaggaggaaaaattgcagggtagatcattttaagagtcctgtaccaggtcagtgacattaagaatgtaaaggaggggtactagatgtatgggtaatattatggaaataaaataagcaggatatggtagattagagttaagagatgactcaagattttaaatctgagtgggaggaggatggttataccagtacagttaatcaatctgctaccatgctgtctggtagaagggcaggcttcattacttctctgtcatttactagcaacacttcaacatccagctatccactataacaaagtatcaccttaaaagcaggagatctacaaatttggaaaagagagctttatttcttaggaagcttgaagcctgcaggcttggaagtgtatcctcagacagagaccaaaagcaagcccttcaaaggaggaagggtgagacaggaagttatgttgaatgggttggctaagtatacatattcaacagattataggaggagctatgaatattcatgagggggtgcacacaagcttagtgtgcacactccatgttacatacatcccatgttcactttgagttggagacctaacatttaatcatagtaaaattaaggtttacatgtcaaaaggtgaaacagagttcataggcatcctatgtgcagccttcatggaccagctagaaccagttggtgatctcttatcagtaaggaatgctggtcagttcaaaaccacaaaaacagagtggagtctggcttctgagttaggcaattggttgatatcagtggggagcaagtcttttgaaagggttggtttctttttaactcttaggaaggaaagttttatggtggttagtgagggaggggacctaacgagacttgctttacctcctgtcccatcatggctgggaactcaatttttaaggtttctctggggtcaccttggcaaagaggagggtgtccattcagtctgctgtagaacttagaattttatttttatttctcaaaagcaaataaccacacttgttgaatcagtaagtttgtttttaggagaatatagcctaagagttacaccattgtagcataaaatacttaaattttatgatgcttgttttttgctgctcattggtttcataaggaaggtgatctattttgactgacatcttgtttttcatgcaagtcttatctagtttcctagcattactattggtttaattatttactaagtttctgggttttgcttttttttttttaatatatgtttgggaatcttaaatatatctaattatatcttcagttataatgtttgtgtttgctatgatttttattctctaagccttaaataatgagattcagaaaatatcattaggtatagagtttattcaagcccaaagcttgaggatggccacctgggagcataggttcaagttgccctggatatacactgtgattagcagcagttacaagtgaatttttaagaaaaaaagcggtttctatgtttatttaccaagaatttacattaagataacgtaagctatcgattggctatacattgttctttgtatcacagatttcaggaacataaaaataatgggtgaggcatcaggtcaggaacataatgaatgcctagtttaaacaattgccctccccccagtggggggcatgagagtcaagtgactgaagtcccctactccagtctttctgggcctggtaaatcttgcatactgtgcatagctgactgctgagctgctttccttctctctaacatgaatttcttgaatgcggtttgtaatctggattaagatagaattagcccttataatataacaaggcatgtggttggccagagctaaattttaggtaatgttttaattgactttacggaaataataaaataacactcagactttctctattggaggttagggcaaaaggatggcttattggtaggtagttcctcacttactgcagaagtagaaaaaagtagaaaagtagaatttacttttttttttggtatgcctagggtttgaagaatgaggttaattcttgttatccaaggtttatgtatttaattgtagcttagctggaagttggctaaaacagaaaatatctgatcaataccatgtttggttatagtttgaattttggctggaattacacgtgtaaggctcttgagaactataaaaagccaaatcagatccattgcgaccatggatttgtgccatttagatttactaatatattgttgtgagtcctatctaatttaaggtaaatatgattgtattgaaaataatttaaaggaaattttaaagtttggtggttttcttagctaattttatgatcaagaacaatttaattattgttactacatctgaaatgatatatcagaaatacggagattttagagggcagggactgtgattattttgtttgtaattctcaacaaaagtgacttaaagcagattgtcattatgtactttaatgtttattctaatttcagatgtgtcttacaaaagtggttgatgttgatggctaatgcctattttgcttaataaaacggcatacaagtccaacttacttgaaaagaaatttttaaatgttattttcttacctgtcaccacaaagaagtaatacgtttgctatcctatcaactcagctgaccagtaagccacttgtagttgtgatattgttagcttttttagctttgggtaagctgataaaactagcctgcctctaattcctgtttataaaaatgtgtgatgaagtatcatatttatgtccagcttttccctttatttacatagagaatacttgctcaaaataccctttagtaatcatcccctctactttgaaatagtggagtcttctacaaattgtactttttctttaactgaatccattcaagtttaaataaaaggctacttccatttcctttaactctttctctgaactataaggctgttgactatacttaatttaacttcctactttgtaggacaaactcaagcaaccagtccttgtggactaataattgtaaaaccacaaacctaattcttaaagcaaaggaaatctgctttccaggtattttgcatttcatcctcttccaggtaaattattaaaacaagcaggaactagttaactttgccactgattgctgtgtgattgagttacttatctttttttcagtcattgggagtggaaactctaaaaattaatgaaagttatttagggtactaaaaaattacccaattttagagtgaaaatatcaagggaaaatgttgatgaaaataaatacttttgaggtgaccaaatgtgtatctttatacttcatgcctgactgtaagggaaacattgctttttataatgtaaactactcatcttgggaataatgaagtggtatagctaggagcaaagaactgatgttgataggagtaggggagtccttttcaattttaatactgtgtagagtggggatttaacaatttttctcagcctttttttttccttttttgaatgggccgagagattgaggggtggaactgaatgcagcctttctcatttatgatagtagatactcaggtcccagggctgctatttgcaaagtccaatgcaaaatgagttatgtggtagacctcgttcaaaaattaatagtttcaaggctgcaacagtagagcattaaactgagtgtggggctctccctatgtgactgtgtaagttggacacccatgaagctggtctcctaggcactttgtacagaaagaaagataaaagctgaataaatgaaactttggcttctcagcaattggctttctctaccccattcctgttttacacaagctagcatgtttttgttgttgttgttgttttctaaaaaaaggccctgattctttttcatttgaggccaaaggaaagaaaattatatttgcagtctttttatatgcttggggcttatgaaccttgaaggattagtgacaacagttataattgaatttattactaacacaggaacagaaaaccaatactgaatgttttcacttataagtaggggctaaacaacgagaacacatggacacaaagaagggagcaacagactggggcctaccttaagggtggagggtaggaggagggagataataaaaaaaactacctatcaggtactgtgcttattgcctgggtgatgaaatagtctgtacaccaactcccgtgacaatttacctatataacaaacctgcacgtgtacccctgaagttaaaataaaggtttaaaaaaaagagttgagtttatttttcttacacttgtgtatcctttggcatgtgtgcatcctcttcccacctcaccactgccagcacgacctccagcaccaactttttaatagtgatagaatgatgatttacctgttcgtgtcatgtttattcctactgtagttctgaatgagctcatagctaatattgtccaccaaacttaacacaggccaaccacttagagaagaaattttcttccctctcgtaggggtatactgtgcctcttactttgggtatagataccccagttgtttcactttgtcctagagataccagcaaccaattagaaaagaaatggattaaacaagacttttaagttattgggcaggtgagaatgattacaaataaaaatacttcggtggcgaatgttaatttagttatggtgtgctttatcaaagaagttccagatgtttttatgaaatctcattctcttgggtcatttatatcgtgaaggaaaaagaaaatgaaactcattgaagcaattattgtataaaatgggcagaaaggtggaaagagcaaaagattttaatgtcaaagtcaaaagtaaattcttaatcttctttgtataaaactaaataatggctcagaaaacagacttgaatttttatgtgttgtgttatctatttatttgctttgcaccaatctggtttagtgctttggcatgttgttgtcgtcatggtcattggtcgtcgtattcatagcatagcagtgtggtgttctttttgaggactcatgagtttattgtatttctctttcatatttgtatttgaccaagacaaatatcttactgaaaggtatattctattttttttttttgcatttgaccttacagctcaatttattctccgtatgagtaaaatattctcagtagcaatttagatcttttataaatcaggtaacttgaaagataacagtcttttggttgaaattgatcacttaaacagtttctgcccaccgaatagtaatcttaggaaggtttggatgactggatttgtttctttctatagaagcttatgcttgagaagaaaattaatactttctaaaaataattttttaatatatttaaagtatagaaacaatgttagatttaaaatactttgtaaagagaaaagagtgtgtgggttttttgtttttaagttccttggagttttttggtcactaacaagtgcaaataaaatcctattacaaaaaaaggctttgtgtaacagttatctatttggcagattattcatataaacaactctgttaaagctttggctgtttatcacagatactgatgagctgcattatattaaaactgaatgtgttagtgatctgtatttaatgttctagtggctcctggtacagtccagaacaaaactacttttccctctagatataataaaatctcttaagtgagaatattggtataacagacatgtttctacctcatccttttcatttattgaaattttctgtgtaaatcatccttttatgtagaggatcctatatagatgtcccctttttgtgcagttttaatatgttaaatactcaattttaaacagattttcccaaaggtatgggcagtatcacaggagtgggtttggatattggcattagaaaaactattgtaaaatatgttcatgtttcacctgctcaaaaatataacatttcaggagataataaatctagaattgatgaagatattaaaacactgaggcatttagatttcaatttccaaagttcccagatttttaatattttaactttgtgaataagtttctagggattctcagtgcatgagattctgtaaccttaactttggagccctgggttctagagatgattgatcagtcataagctggcagagttgtcctgctttccaaggttataataccttcaaatactcattgctacaaaaatgatggcattctcatttcaagtttagatctgatcattcataaaacagcctaaacttaagagtttccacagtccataaagcatcaaaagccataaaataattcttttttccctattaaagaaaaagccaaaaatatttctgtattttagaataaacatttccagttccatttttaaaatattaacaacatgtaaatttaaatgcttttgtaactgataaaatgttcttttgcatatttccctaccatcctcctgcccttcttcctcaatttgctttacacccctaacattaacattctgtgaacaaatttttaagggttgttataatgtattctatttgtatcctacagtaatttatttgcattttaaaaggagtttgaatacagtgtggcaattttgacaaccagcaagctcatcaaagtaagattctacctgtaatcttatgatacaccaaatgcctgctctattctgcctaacacagacaaggatccatctttacagatggaaagaatagctgacatctagtagcacttactctttgagttccctgaactctatttctagtgtatgaatcactcataacccacttaaattcagattgctcaccaaagcgattaggaaaaaggtttttcctactgggtacaaagcataaggtatttcactcttgtagttgttgtgaataacctagtttctgtacataagctggctggtcagtgatttatatctaggataatgaagtatgtgtgactgcagcaacatatttaaacaaatgatgcacaatgttgtacaggaatattacctgtattaaataggagtaaaacattttcattcataggctgtctaaatatcaatggttaaattactgagttttgctttatttttactccagaagtatttgttgagttcctactacatgcgaggctcttgactgagataactaataagatccttataagatttttctattccagagtttggttgtttagctttgaattacccattctttaatacctaacttgacttctagtagttctttacttattagactcttcttctaaggataaacagaaaaagactgtgtcctagattttacttttgaataggcaggtgacaggaagctgaaaccagtggcttcaatgagatttaggtttcttgtggttttgaattttctatatgacatttctgttatcattgccatttgactaaggaactatgtttactggttttgtaatagtagcatctattcttttggaatctggactttgaacaattcgtttcacagagtcattgaacagccagttccttctctcttacttagaatttttccagggaatttttcacatggcaggataatggaagaaaagccatttgggtaactcttctgttacatttgtatccctccccccttggatccctacagataaattcttaccttctcttcctgctaattgaccagcagcaccctggattgctatcatccctttgtccaaagaaatggtgtagctgtattcaaagacctataaaatgttatgtgctatctattgctacctataaaaaatacctttttttctttttaaaatcaggttgttttagaataaataaaggaaaagtcaattaatggaaaaatttcaagaacagttcacataaaattttggtctattttaatttttttttttaccttttcaaatcacattttaaaataagcagttggagaaaatgtaaaatgaaaaatatgtaaagaatagttagcattaaacatcagatccaattgtaaacttacgtgagataatatggatttatatttattttctagtaaaataaaacttatatgattgcataattgattattgtatatgcaatacaaattaagttcaaaaatgaaagttgagctttttttgtcctttcaaatgtagggccagcatacaattttaagagctatttattataaaattcatggtgaatcactatgaaaattgatttttccttgagcttttaattacattatccatattcccttacgaagttttccaagtatagaagacctacttaatggagcagtaatcaaatgcaaacttaatttaatgatctcaaataaaaggttctacttttctggaaataagattaaaccagatattaaaattatgtatgattataaaagtaaagattaccattattgtaataattgaccaatttagtactttcaagttatttagttacattttctcagttctagtttggtgtggtaaagcattatttgaaaaggcagtataggaagaatacagatagtattcttcagtacagataataccgctgtacagtacagataatattactgctattacagaatcagcaagttgaatgcatgcttcagggaatagggaaatgaatgcggactttttctaactgatttagatggtctgtctgacctctctagaaaaatatgtgtgtatgtatattttgaaatatataaggaatgttaagtctttctcttcccctttttagccttagattgtaagcaaaagaaatcaaggtcaagatctggaagcaagaagaaaatgctaacattacctcatggtgctgacgaggtttacattctccgatgcaggtatatgcctatattgccaaatctgatcagtttcttcatactttgctttgaaacatattagctatttcatttgggatttttaatttgtggcagagtgcattctcaacaatcaagttataaatgaacttttggagataggcttaaaatcttaattcagctcacaatatccgtacttcaacaactaatgaatcaagttttttacattagccaatagtaatgtaaatctattatactgtgatttattaaagtagcttggccaggtgtggtggctcatgcctgtaattccagcactttgggtggccaagatgggtggatcacttgaggccaggagttcaagagcagcctggccaacatgatgaaacctcgtgtctactaaaaataccaaaattagccaggctttgtagcgggtgcctgtaatcccagctacttgggaggctgaggcaggagaattgcttgagcccaggaggcagaggttgcagtgggccgagatcgtgccactgcactccagcctgagcgacagagcaagactctgtctcagaaaaaagaaaaaaaaactggctttccttgtgtttatttggtttgtatggtttaattttgtttggtttgatgttttgttgtcttgagttctcgcttattgggaacacattttctctcccctcatagtcacgccttcttccgtactcacactcacacacaacacacatgaagaaacatagacacaatgccatttaaggaatgctaaactggggaagggtcttttctaaagaatgacatattttggagtaatagttgttgtttcaagtgaattaagatgtgtagatgttaattttaaaataataatgctcccacctatacaaagattactggagtttattatagctgttaataaacatatgaattgggagttttgatgttttattaaatcatttgactttagaaactttatcaattgctgtctttaaaatatgataaagtttattccttatgttttaggattttgtgtgaattagttttaaagaaagagaattggtcatgttaagagaattgttatctttctgtaggttttgtggcctagtctttcgaggacccttgtctgttcaggaagactggattaagcacttacaacgacatattgtaaacgctaatcttccacggactggagctggcatggtggaagtcacgtcactacttaaaaagcctgcctccattacagaaacttcattttctctactaatggccgaagcagcttcatagaaccaggaaaccttttaaatagccagtttgaattggatgtaaatttgaaattctttttttttaagccacattaaattatctgtttataaatactaaagcaggaaaatggggggaaagtgaattacagtgacatcagagcaaattgaatacttaaaacagtaagtagtctatatattttatatagggtggaagatgtgtttttaaggtttatgaagttttgttggttaactgtgttcactcagtaaaagagcagtacatgtaagcagccattaataaactgttgcacatggatacttatagacagacttattggacaattatgttttttgcagtgttaccagaatcaaggctctgtttattccccacaagacttgcatagaaaaataagatattatattttgtttgtatgtatttagtgttttgtataataccaagaaccgctgactaaatttactcaaattagggcattaaatatcatgtacttcatagtttgagactgttcactcaaatagggcagagtactattctatctagatgtgtaagtgttttttttaaaatcacatggaacggttttttttatactaaaaagtggagggagatttgtttaaacaagtatttctaaaagaaatatgtacatagttctggaaattatttgtggtaaggaaatattctttactccagttgcatttctcagacaataaagtggtgcatccatgctacctcctactttgtcaacaaagatgctatttaccctttacatttttgtatcataatagattttaaaaatctaatgttctttattgcaagacattcttttgttaacaggtttgtttctttttaatgttttacctaaaatttgacatgcttacaggacaggtttgcctcttactttatttaacattgtagaaatgtaattaataaacaatgctcactacacagtttagaatagacgttctcatttatattatcttccaaatttgatcagttagcaaaacttaatacaccaattaaaatatttctacatatgagaatgtttacaatttaaattttagaacttgttttggatgtgattatatgtacgaaaatcgtgtaacactatgctcatgctaagaaccgacataacagaattactgaaataaatgtgctgtgaggaatggaaaatatggtgcaggtgtcttggtcatgataaattgtgattctttttaaaaattttttccaaaaacaattaggtattttaatctgaaatcagattcctttacaaacaacaagtttttgtatgcaagcaccattttatttcatgtagtatggctaatactatagttgaaccaaggatatgcattgattctttgcttcgtatgtaaataaagttaaaaacagttaaaataaggagtattttggtagagtatatacatacctcactgccagtgaaattgctttcctatggtatatctccttaccagaaaaatctctaaataaaaaaaggtttaaagaaaattaaaatgtgaaa

SEQ ID NO: 241 - DNA, 26018 bp, Homo sapiens
tctagactaaatgtgttaaatgggcttgccaacaatatggatgatttgaagataaacaccgatattactggtgctaaagaagaactcctagatgacaacaattttatctcagacaaagagagcggagttcataagccaaaagattgtcaaacatcatttcagaaaaataatacgttgactctgcctgaagaactgtcaaaggacaaatctgaaaacgccttaagtggaggccagtctagtctatttatacatgctggtgctcctactgtttctagtgaaaactttatcttgcctaaaggagctgctgttaatggaccagtttcacactcctccttaactaagacttccaatatgaataaaggcagtgtttcattaaccactggacagcctgtggatcagccaacaacagaatcttgttcaactttgaaggtagcagctgatcttcagctgtctacaccacagaaagcaagtcaacaccaagttttatttttgttatcagatgtagcacatgctaagaatcccacccattccaataaaaaactacctacctctgcttcagttggttgtgacattcagaattcagtagggagtaatataaagtcagatggcactttaataaatcaagtagaggtgggtgaggatggtgaagatttattggtgaaagatgattgtgtcaatacagtaacgggaatttcctcaggtacagatggatttaggtcagaaaatgatacaaactgggatccccaaaaagagttcattcaatttcttatgactaatgaggaaacagtagataaagctccacctcattctaaaataggtctagaaaaaaaaagaaagcgaaaaatggatgtaagcaagataactcgttataccgaggattgctttagtgattctaattgtgtacccaataaatcaaaaatgcaagaagtagactttctagaacaaaatgaagagctacaagcagtagactcacagaaatatgcattatcaaaagtgaagcctgaatcaactgatgaagacttagaatctgtggatgccttccaacatctaatttataacccagataagtgtggagaagagagttcacctgttcatactagcacttttctttcaaataccttaaaaaagaaatgtgaagagagtgattctgagtcacctgctactttcagtaccgaagagccatcattctacccctgtacaaagtgcaatgtgaattttagggagaagaagcacctccacaggcatatgatgtatcatttagatgggaatagtcactttcgccatcttaatgtcccaaggccatatgcttgtagagaatgtggacggacatttcgagatcgcaattcacttctaaaacatatgattattcaccaggagagaagacagaagttgatggaggaaattcgtgaattgaaagaacttcaggatgaaggaagaagtgcacgattacagtgtcctcagtgtgtgtttggtaccaattgccctaaaacatttgtgcaacatgctaaaacccatgaaaaagataaaaggtactactgctgtgaagagtgtaacttcatggcagtgacagaaaatgaattggaatgccatcgaggcattgcacatggggcagtggtaaaatgccctatggtcacttctgatattgcccagagaaaaacacaaaaaaagactttcatgaaagactctgtagtaggatcatccaaaaaatcagctacctacatatgtaagatgtgtccttttactacttcagccaaaagtgttttaaaaaagcacacggagtacttgcattcatcatcatgtgttgattcatttggtagtcctcttggacttgataaaagaaaaaatgacatccttgaagaacctgtagatagtgatagcactaaaacattaactaaacaacagtcaaccacatttccaaagaactctgctttaaaacaagatgtgaagcgaacatttggatcaacctcacaatcaagtagtttttcaaaaattcataagcggccacacagaatacagaaagctcggaaaagcattgcccaatcaggtgtaaacatgtgcaatcaaaacagctctcctcataagaatgttacaattaaaagcagcgttgaccaaaaacctaagtatttccatcaagcagcaaaagaaaagtctaatgccaaggcaaatagccactatttgtatagacacaaatatgaaaactataggatgatcaaaaaatcaggtgaatcatatcctgtgcatttcaaaaaagaagaagctagttcattaaattctttacacctgttttcatcatcaagtaattctcacaacaattttatttcagaccctcataagcctgacgccaaaaggcctgaaagcttcaaagatcacagacgtgtagctgtaaagagagtaattaaggaatctaagaaggaaagttctgttggaggggaagacttggatagctatccagattttttgcataaaatgactgttgtcgttttgcaaaaacttaattctgctgaaaagaaagatagttatgaaacagaagatgaaagttcctgggataatgttgagttaggagactacactacacaggccatagaagatgaaacctatagtgatattaatcaagagcatgtaaatttattccctttatttaagagcaaagtggaaggtcaggagcctggagaaaatgctactcttagttatgaccaaaacgatggcttttattttgaatactatgaagatactggaagtaacaactttttgcatgagatacatgatcctcagcatttagaaactgcagatgcttcattgtcaaagcatagttctgtttttcattggactgatttgtctcttgagaagaaatcgtgtccttactgcccagcaacatttgaaacaggtgttgggttatcaaatcatgtcagggggcatcttcacagagcaggattaagctatgaagcccgtcatgttgtatcaccagaacaaatagccacaagtgacaaaatgcagcatttcaaaagaactggcacaggaacacctgttaaacgagttagaaaaggtaagttctccatggggatgatttgggctgataggtctgtgttctaattctgaagatttaaaagttttttttgaatttagtctttattagaatcataattttatgtttcagaattaactcattttagggtggtcagtttatataagaaagtctgatattactcttaaaaatttttttctagctatagagaagtctgaaaccacttctgaacacacttgtcagctctgtggtggttggtttgatactaaaattggattatcaaatcatgttagaggccacttgaaaagacttggaaagacgaaatgggatgctcacaaatctccaatctgtgttctgaatgagatgatgcaaaatgaagaaaaatatgaaaaaatcttaaaggcattgaacagtcgtcgtattattcccagaccatttgtagctcaaaaacttgcatcaagtgatgactttatatctcaaaatgttatacctcttgaagcataccgtaatggcctaaagactgaagctctgtcagtgtctgcatcagaagaagaagggctgaatttcttaaatgaatatgatgaaacaaaaccagaactgcccagtgggaaaaagaatcagtctcttacactcatagaacttcttaaaaataaaaggatgggagaagaaaggaattctgctatttctcctcaaaagatccataatcagacagcaagaaagagattcgttcagaaatgcgttcttccattaaatgaggatagtccgttgatgtatcagccacaaaaaatggacttgactatgcactcaggtaagaggacgtttatgactatgctatacacagtttaaatgcagttcaattatgccttctttaatggaatctatgtggaaaatactttctcacaatcttcctgtttaagctgctttttttttttacagagcacagattggttattctactgtcatttctgtataactcatcaattgatgctcattagcactgagttctctgtgcctcttttcttggtctgaatgtaaggtgagaacaaaagcagaagaaaaccacacacacacacaataaaaacaacaaacaaaaagctgatctgtaaaaataaaacttgctctggctggaggatggttgtggatgggaggttgatgttcaaaagcatagcattattgaaaaggcatacctctgtcatatttttgccagttctccaaggtgatcatgttttcaagatttagctgttggtttttccactgcttaggtaaaacaaaacagactcttaaagctgaatggattggtgtctgttgtgattaacccaaagaaacatctccctctccaattcctcattgtattgcggaatagtttggttttggagaacagttgtgaacataaaacatatttgtttggggttttaggttttaagatagtgctctaatggaacaggacagatgatttagcttagtgctggtgcaccaatagttttttccttttgaaaggaatattttgtatgtattggcaaataatgtggcagataaagtagccaaactttattcagtattgccaagtgtggtttatacttttagactagaaaaattttaagtgttttttctagatttctttttgaaggttaatgttgaaggtttatgtaaatggtctcatgattagagctctaagttgaatgtgtcagaggtaatagttaatggattaataacgactaacattactgtaaagtaatgttgtttatttgctttggggcagacattgtgatatcccaaatagttgtaatgcagttttgatttaaggaaagataactttgtattgtaagtggtctggaaagcagtttatcttgtatgagcttctgtttaatccggctttttctttcgaataaagagtctctgaaagtcaatagctttcaatattttttcagaagggtaaaacgcagggaagatgtgttagctgtgttgaccaaggggtagtatacttcagagatggaaagcatatttgtggctatcacagtaatgctgaagaaaccagttgaaatgtgttgggggagtgaggattgtctgagaagttaggagtttcttattgtttgaacatgtttttcctgtgatgactaagatgttagcttgttgatcatttatttagcacaaagattttagcaaaaaactttaaatcattaactttcattattgattgcgcattcagagtaatgaacataaaataccctaaataaaatgttgtgtctaacagctgttcagtggtgtgttttaccaccttttctcccagccttcatcagaaagcctaatttagtattgagacttttacggttttgtgggtaaaacactttaattaccactttgtcaactagactttttaattctttttattggtaatgttgtaagctttgaaacttctcaacagaaccgtgttgttcaaatcacaggattgtattgtagtaggtttaagaaataatctgcgtaacacagaaatctgcaagaaagtaataataggtgtatatccagaggagctcaaaggttcaagtcactcctcgtctacctttccaaagagcatgagttgactctaaatactaactacaaactaataacagttaacttaatttcccctccttattttaagttaacctatttcattgaacgttttgaaaaccatctttattgtggtgcttttctacactctttaagctaagaaaatttcactttttgaagtgagaactggattatagttttcttttgaatgataggtatgcctgtgaagcttagaacatgtgtgcattgcaatacgacgtttacaagtgctgttagcctgtccaaccacttacgcgcttatgcacgaaagaagagtgctggacttttgactggtacaggtatgtttgaacagatatcacagcaagtctgtttgatacaatacactttttttttccccaccagactggtgttaattcagatcatatttatagctttctttggtaagctgcatttgagtctgaatacccattgaatttcagcaacttgtaaactgttagatgtaattctaagcaagttaatctttttcttttggctcttattgacttaatttgggggaaaaaaaattaacccaagaggtgtggaactttgagtctaccttaatcccatttattttttagaatactatttttgatttttaaattgattttagattccagtaaaacacctctctttatagttctagtcgggctcagtggtgtgcccctatagtcccagctactcatgaggctggcaggaggatcacttgagctcaagagttagcggctataatgtgctatgattgtgcctgtgaatagtcactgcactccagcctgggcaacatagcataaaaatattgtagttctagcttggggaaatcctttattagaaaaggaaattatagggaaatttcaaaatgtagacttgattaggaaactaagcaaactaatgaattttcattagtctatagattagatctttgaaggggtgagccttaataatggcttgtgttgacaagcgaatagatttttcttttaatacttcttaaatatattaaggattaataaatttagctatgcacataagtgttaacatgcacatttctgtgttatttttggttggttagcccaaccttgcagatacctcttaatactgctcatctgtgaaaattttattagcttacttatatgtaatacgcttcttataacctacaaaatgctttgcactttcatttgtagtcttttaagctaccctgcttcagcaaatctcatttccctcacatcttaaaatataccctctttttgacatagatctacataaattcttttgcctaaaattctttccaatcattttatttctcttgctcttttttagatcactgcctcctgctttcttctagttgttttcccagcttttttgttcttcctcatgtcctagaacttagatccaatatgttcttgctttcaaaaaaccacttatatttatactagtgtctttcttctgcttctttgcattcttccttaacttgatatacaaatgaccagggatgaatgttgacaatttatattaaaaagagaggagtggggtgagttttagtctactggattaggcctcctactctgagattataatttttatataccctcacctttatcaggcttggcaagtgattgcagacattagaggtggggaacaataaaaataagagactatacaagtaggaaatcattattgttaccatacttgctaacttttattgaacatttactatgtgtcaggcactatgctatgcaatttacatgcataacatttaatctttacaacagccatacaagttgtaggtactggaattctcttaacgttttataggaaactaggacttaaagaacttaatttgctcaaacttacacagttaataagtagcaaggttgtaattcaaatcagggctatcttacctaatctttgtttttaatcactattctctaccttacacaggcggtctatttttgaatttcttatttttaaaataagaaattgaaataaaaataagcaatggaaaattctaaaatgaaggtgggtttgtttatttatttatttattttgagacggagtctcgctctgtcacccagattggagtgcagtggcgcgatctcggctcactgcaacctccacctccctggttcaagcaattcccctgcctcagcctcccgagtagctgggattacagactcatgccatcatgcctggcaaatttttttgtatttttagtagagatggggttttaccatgttggacaggctggtctcgaactcctgacctcaggcagtctgcccgccttagcctcccaaagtgctgggattacagccgagagccaccgcacccagcctgaaggtgggtttaaaatggggactattctggtgaagactgaataaataagagtctaattaaaaagagcagagatccaagaagtgcttaggcctaaattagactttagaggagttaatgttccattctgattattcaagcagattatgcaaatatccaataaggcaagatatctccagtccagattttattagtccattaaaaaaatgcttttacttcatctgaaaattctgcaaaacacaggattaattacttataaataactggtagtaaatctccatttaccaagaatgcacttatgaagattatctaaaaaatcttcattatcagagagaaaagtaatgtaggatgactgggaatatgtttaggtcctgaagaataaaagagggtgttattttaaaaatatgattaagtactaccaaaatattagaagtactaggaaatagaaagcgtgtgtttggcagtcctaggcaaagaaaaggaaaatgagaaactgaagaaagcctagggtcttattttccacacccagtagccacttttgagaaactttaaaaactaatgcttctttttcttggaaattctgaaacattttttccctcattaaaaaaaatcttcttgatcagtagagctatacagatgtctttgctgcttattcatgccaactaagaagttttttttcaagctttattaacttttctgttttccagatagagaattctgtattgtatttacaaactccacatactgattatcccccatatcaatatcactgttataaagcagtgttcctaaaaacctatggccctagaaggttccacttggttattataagtgattcattaattcatatgagtaacaggcatcatttttcaagaacacatgatcttttaatgaataaaatgcaaattcatttttataaaatcttaccttagtatatcacaaaattggaacaatgtaaagggaaagtagataggaataaagcctccctaaccatgtccagtatgtgtatttctagtttaagcagtcttaattcatgtagattttaagttgtgtggtccactcttgaatacaaagcttagataccctcagactaaatggtaaaggcctgcttttggttacctgtgatagaataaactttcaagccttcttagaagccacagctcctggtcttttctgtgggaactggtgaccttttgagggaagaaaaatatttcttctaacttataatctcttcaagtatcctgaatacactgaaaaggatatccctcttcttcccaaaatacctgtttactggtaacttaaatacttctaatgtgatggttctcaatctttactggggtcaccgacatctttgagaatttcatgaaagctgtgggccccatcccagaaacatgcacttatttgttctcagataaaaatttttgtgtgtatagactttgcgtatctcctgaaggctatcatcaatttgtctgatggcaaattgagaaaggagagatgccagaataaaaggaaagtagaaacagaactaggaatcagaagccttaagaagttcttttttttttaagagcagaagatgcttaaaatgcaagaattgcataatagcaaaactaattgtggggtcattatcttccctaatatttgtaaaaggaaccgatgggggaaataggaaagatttagaattgaagatttggaagaggtgggcagacttgggagagttaaattgtcataaaagaataatttcacagattaaagttttgcccagaactgtcccagtttatcttctgttgggtaggttcaaataaattgtttaataatttttctgtgtcttcacttgtagataatttatgaagctgttttacttcctttccccgatcaatctttatcaaaatagactagaatcaaagggtttattttatatcctatattgtaaatttaaggcagacttcttattcaagagtttattctagttatttatggaatgcagtaatggtaggggtttttttttttttgagattttgttctctttaatgttttacatgctcatacagatttttttctggttaattttccatacagtttaatgagaacattatatagttttcattaaatattgaaattttataatgtagcttatattaattacttctggactttttattttactgattagctttttttgtgcctaatgttttaattaaatgatgtatttttatgctagccatattaagaacatagttctattaagttattaatggagtgactatacatactggtttaccttgttgtcacacctaagtactagtgcctcttttactctcataagtgtcctggattgaatgataaattaatcatcctggttattaaaattgctaaagcatttaaaattaaggtaaagcatattctatcaacctaatctgcaatcaggaaaaaaaatatattttgaggtcaaaataagagtgaatttcaacaggtagggaaagggaaatacagagtagagagaatgttgttaaaggaagtagatctgtcagatgaatgccacaatgcttttctatggtagatagcatgttgttatcttttgtaaagaagaaacaatgatggtagcagtcagcattttaattgagactttattttatatcttgaccacatgtacaaacttacattaatacaaacacacaattccttgtgtactcacctaaatgtactttaatattttcttttttattatattctttgttgtgaaaaattaatgctggtcatgagccagtaaattgatttgctacccacttaagaagtcactatcatagattgaagacactgccctaactgcctctttctcttaggggttggtactgaccaatggtagtagtatcttagatgtcataactcttctgtggcagcaggtgaattttctatactcattctatccacatttttctctctagatcacttttgtaaatcaaatgctaacctctgggacttaaagtaattggaaatttctagttactcatttaaaattaatgcaagaaaaatatttttatatttgggaggggcttcatttcattatcttcagaacaattttgtgtgtgtgtgtgtgagacggagtttcactctagttgcccaggctggagtgcaatggtgcagtctcggctcactgcaacctctgcctcccaggttcaagtgattctcctggctcagcctcctgagtagctgggattacaggcacacgccatcacgcccggctaattttgtatttttagtagagatggggtttctccatgttggtcaggctggtctcgaactcctgactttaggtgatccacccgcctgggcttcccaaagtgctgggattacaggcgtgagccactgcacccagcccagaacactttcttgatacgttttggaagtaaagcccaattgttgctattctacaacaaatgacttatccatcataattatttgacttttctgatgaggtcaataccactagtgcaatatattaacgtttttaaaaaatcaagtcagtgttttatttttcataccatctacttttaagtgtaatcgtagtaggtttcttttgcctgttttcagctttaatgatataattggccacacaggactgtaacaagtactaatgaacatatagcacagtatcaagtgctgaatgggtttgtaagccactagaaaagtcattcttatgttgtggaaagtgctatgggagcactttctgatgtgatagaaaaaatagtattgtgaaagcttcccaatgtgcattaaattatttgttcattcatgagtgtcactgtagtgtcttttaaaaataatatagtattgcatgtttgaaaaattgcatgttttcatagtggttcattcagactgaaagagtgtaagtagaaaattttgatcttcttattaagattaaactccaaatgagcaaacttgcttctgcttaaagcaaactccttgacaattcttccagactgggctgaggagggtatgtgaaaagtatgagacatgtctctgctgtcagagaaattaggaaaggattgttgacaacatacataaaactatcaaaaattgaaaactatgcaagatagtatacaactaaatggcatattggctttaagtgttgtaggagttcaggttgattattttagtctaagcctccttttgagggcagctgggaattgagattccttttttttctgatgcccttactgtttgtctcattgaattagagcttgtaaaaaacagaaaaaataaataaataaaagtagttcatgctggtatgcttcttgtgactttttaaatgcaagagaacaacaaaaccagcagccatacaaaattttattcattcaacaaaagtttgagttcttgtaccaagactgttcatcgctgagccagtaaagatactgcactccagctgcataaacataatataacccagtgggaaaagatcaagtatgccattacagaagggtttatatggtttcagccagaccctgaagttgaaggatgcagtagagttttaggaagacgagatgaagtgtagaatatttcaggcagagaagaacatagtgtggacacaaagggatgaaatttggacttcaagtgtcaggagtggaacttggagttcaagtgtcagaagatttggttacagatgtttggtaaaattgtagtgccagaaaggtggggttggtgctttgaatgcttggtaaaaaaaattaggaagtcattaaaggatgttttaaaaataaggaggccgggcgtggtggctcacacttgtaatcccattactttgggaggctgaggcaggcacatcacctgaggtcaggagcgtgagaccatcatggtcaacatggtgaaaccctgcctctactaaaaaaaaatacaaagaactagccaggcgtggtggtatgcgcctgtaatcccagctattcaggaggctgaggcaggaggattgcatgaacccagaagctggaggttgcagtgagccgagattgtgccattgcattccagcctgggcaacaagagcaaaactcctcaaaaaaaaaaaaaaaaatcagcccagtgtggtggtgcgcgcctgtaatctgagctactcaggaggctgaggcaggagaattgcttgaacctgggaggtgcaggttgcagtgagccaagattgcgccactgcactccagcctgggcgacagagtgagactccgtctcataaataaatacaaaaggaaaataggccaggtgccgtggctaacacctgtaatcccaagcactttgggaggccgaggcaggcggatcacctgaggtcaggagtttgagaccagcctggccaacatggtgaaactccgtctctactaaaaaatacgaaaaagtagccaggcgtggtggtgggcgcctgtaatcccagctactcaggaggctgaggcaggagaatcgcttaaacctgagaggtggagattgcagtgagctgagatcatgctgttgcactccagcctgggcaacagagcaagactccatctccaaagaaggaaggaaggaaggaaagaaggaagtgaaggagggaggaagagagggagggcagagagagagagaagaaaaataagggaatggtatggttaaacttatattttaaaaagcctttcatgagacagagaaaagatgggtctttatatttcttagctataacttatttctatagtattgttcttcattaagagcatatatgtgtatacatttatctgcacagtaacgtatcatttataagtgattagcaaggtaacgaattatctgagttgagtaaattctctaggtgactgaagaatagtcctttaactgttaataacttgatttttcctaaccattttggtggttattgctccaaaatgttgttcttatttttgccttgagtagcttggatataatttaatcgagtattttgggtaacccttatagatactctactaattgttttattattccagcaagaattaggctatttctccaccatacaaaaaaatgatcggctgattttttcactaattcaacaagcacttttttcacctccaactgtgctaagtatgcagagatacattggatcttacaatacagtagaagcacatatatgcataactgtaatacaagacaaattgttaagtgccattggagaggtatgcgtgaaatactgtggaatttcagagaaagaggaagacactttcagctagactaggaactcccaaggcttttggaattagcatttgaatggaccctgatgtatagctaactgaaatggaaatgggggtcggggtggggaagagaaatgcctgaaagagggagcaaggtggaacaatgtgggaagtttataggaaatactaggaagtaggaggtaagggaattgagttggactggtaaagtgagtcagatagatgacatagaacgctagtctaagatgttggaattaactttgtagtggggaactatttgaatgcagaatttgtgtaatgcttttgaaattgctttttaaataaaggatttggcagagaggaggaaaaattgcagggtagatcattttaagagtcctgtaccaggtcagtgacattaagaatgtaaaggaggggtactagatgtatgggtaatattatggaaataaaataagcaggatatggtagattagagttaagagatgactcaagattttaaatctgagtgggaggaggatggttataccagtacagttaatcaatctgctaccatgctgtctggtagaagggcaggcttcattacttctctgtcatttactagcaacacttcaacatccagctatccactataacaaagtatcaccttaaaagcaggagatctacaaatttggaaaagagagctttatttcttaggaagcttgaagcctgcaggcttggaagtgtatcctcagacagagaccaaaagcaagcccttcaaaggaggaagggtgagacaggaagttatgttgaatgggttggctaagtatacatattcaacagattataggaggagctatgaatattcatgagggggtgcacacaagcttagtgtgcacactccatgttacatacatcccatgttcactttgagttggagacctaacatttaatcatagtaaaattaaggtttacatgtcaaaaggtgaaacagagttcataggcatcctatgtgcagccttcatggaccagctagaaccagttggtgatctcttatcagtaaggaatgctggtcagttcaaaaccacaaaaacagagtggagtctggcttctgagttaggcaattggttgatatcagtggggagcaagtcttttgaaagggttggtttctttttaactcttaggaaggaaagttttatggtggttagtgagggaggggacctaacgagacttgctttacctcctgtcccatcatggctgggaactcaatttttaaggtttctctggggtcaccttggcaaagaggagggtgtccattcagtctgctgtagaacttagaattttatttttatttctcaaaagcaaataaccacacttgttgaatcagtaagtttgtttttaggagaatatagcctaagagttacaccattgtagcataaaatacttaaattttatgatgcttgttttttgctgctcattggtttcataaggaaggtgatctattttgactgacatcttgtttttcatgcaagtcttatctagtttcctagcattactattggtttaattatttactaagtttctgggttttgcttttttttttttaatatatgtttgggaatcttaaatatatctaattatatcttcagttataatgtttgtgtttgctatgatttttattctctaagccttaaataatgagattcagaaaatatcattaggtatagagtttattcaagcccaaagcttgaggatggccacctgggagcataggttcaagttgccctggatatacactgtgattagcagcagttacaagtgaatttttaagaaaaaaagcggtttctatgtttatttaccaagaatttacattaagataacgtaagctatcgattggctatacattgttctttgtatcacagatttcaggaacataaaaataatgggtgaggcatcaggtcaggaacataatgaatgcctagtttaaacaattgccctccccccagtggggggcatgagagtcaagtgactgaagtcccctactccagtctttctgggcctggtaaatcttgcatactgtgcatagctgactgctgagctgctttccttctctctaacatgaatttcttgaatgcggtttgtaatctggattaagatagaattagcccttataatataacaaggcatgtggttggccagagctaaattttaggtaatgttttaattgactttacggaaataataaaataacactcagactttctctattggaggttagggcaaaaggatggcttattggtaggtagttcctcacttactgcagaagtagaaaaaagtagaaaagtagaatttacttttttttttggtatgcctagggtttgaagaatgaggttaattcttgttatccaaggtttatgtatttaattgtagcttagctggaagttggctaaaacagaaaatatctgatcaataccatgtttggttatagtttgaattttggctggaattacacgtgtaaggctcttgagaactataaaaagccaaatcagatccattgcgaccatggatttgtgccatttagatttactaatatattgttgtgagtcctatctaatttaaggtaaatatgattgtattgaaaataatttaaaggaaattttaaagttaggtggttttcttagctaattttatgatcaagaacaatttaattattgttactacatctgaaatgatatatcagaaatacggagattttagagggcagggactgtgattattttgtttgtaattctcaacaaaagtgacttaaagcagattgtcattatgtactttaatgtttattctaatttcagatgtgtcttacaaaagtggttgatgttgatggctaatgcctattttgcttaataaaacggcatacaagtccaacttacttgaaaagaaatttttaaatgttattttcttacctgtcaccacaaagaagtaatacgtttgctatcctatcaactcagctgaccagtaagccacttgtagttgtgatattgttagcttttttagctttgggtaagctgataaaactagcctgcctctaattcctgtttataaaaatgtgtgatgaagtatcatatttatgtccagcttttccctttatttacatagagaatacttgctcaaaataccctttagtaatcatcccctctactttgaaatagtggagtcttctacaaattgtactttttctttaactgaatccattcaagtttaaataaaaggctacttccatttcctttaactctttctctgaactataaggctgttgactatacttaatttaacttcctactttgtaggacaaactcaagcaaccagtccttgtggactaataattgtaaaaccacaaacctaattcttaaagcaaaggaaatctgctttccaggtattttgcatttcatcctcttccaggtaaattattaaaacaagcaggaactagttaactttgccactgattgctgtgtgattgagttacttatctttttttcagtcattgggagtggaaactctaaaaattaatgaaagttatttagggtactaaaaaattacccaattttagagtgaaaatatcaagggaaaatgttgatgaaaataaatacttttgaggtgaccaaatgtgtatctttatacttcatgcctgactgtaagggaaacattgctttttataatgtaaactactcatcttgggaataatgaagtggtatagctaggagcaaagaactgatgttgataggagtaggggagtccttttcaattttaatactgtgtagagtggggatttaacaatttttctcagcctttttttttccttttttgaatgggccgagagattgaggggtggaactgaatgcagcctttctcatttatgatagtagatactcaggtcccagggctgctatttgcaaagtccaatgcaaaatgagttatgtggtagacctcgttcaaaaattaatagttgcaaggctgcaacagtagagcattaaactgagtgtggggctctccctatgtgactgtgtaagttggacacccatgaagctggtctcctaggcactttgtacagaaagaaagataaaagctgaataaatgaaactttggcttctcagcaattggctttctctaccccattcctgttttacacaagctagcatgtttttgttgttgttgttgttttctaaaaaaaggccctgattctttttcatttgaggccaaaggaaagaaaattatatttgcagtctttttatatgcttggggcttatgaaccttgaaggattagtgacaacagttataattgaatttattactaacacaggaacagaaaaccaatactgaatgttttcacttataagtaggggctaaacaacgagaacacatggacacaaagaagggagcaacagactggggcctaccttaagggtggagggtaggaggagggagataataaaaaaaactacctatcaggtactgtgcttattgcctgggtgatgaaatagtctgtacaccaactcccgtgacaatttacctatataacaaacctgcacgtgtacccctgaagttaaaataaaggtttaaaaaaaagagttgagtttatttttcttacacttgtgtatcctttggcatgtgtgcatcctcttcccacctcaccactgccagcacgacctccagcaccaactttttaatagtgatagaatgatgatttacctgttcgtgtcatgtttattcctactgtagttctgaatgagctcatagctaatattgtccaccaaacttaacacaggccaaccacttagagaagaaattttcttccctctcgtaggggtatactgtgcctcttactttgggtatagataccccagttgtttcactttgtcctagagataccagcaaccaattagaaaagaaatggattaaacaagacttttaagttattgggcaggtgagaatgattacaaataaaaatacttcggtggcgaatgttaatttagttatggtgtgctttatcaaagaagttccagatgtttttatgaaatctcattctcttgggtcatttatatcgtgaaggaaaaagaaaatgaaactcattgaagcaattattgtataaaatgggcagaaaggtggaaagagcaaaagattttaatgtcaaagtcaaaagtaaattcttaatcttctttgtataaaactaaataatggctcagaaaacagacttgaatttttatgtgttgtgttatctatttatttgctttgcaccaatctggtttagtgctttggcatgttgttgtcgtcatggtcattggtcgtcgtattcatagcatagcagtgtggtgttctttttgaggactcatgagtttattgtatttctctttcatatttgtatttgaccaagacaaatatcttactgaaaggtatattctattttttttttttgcatttgaccttacagctcaatttattctccgtatgagtaaaatattctcagtagcaatttagatcttttataaatcaggtaacttgaaagataacagtcttttggttgaaattgatcacttaaacagtttctgcccaccgaatagtaatcttaggaaggtttggatgactggatttgtttctttctatagaagcttatgcttgagaagaaaattaatactttctaaaaataattttttaatatatttaaagtatagaaacaatgttagatttaaaatactttgtaaagagaaaagagtgtgtgggttttttgtttttaagttccttggagttttttggtcactaacaagtgcaaataaaatcctattacaaaaaaaggctttgtgtaacagttatctatttggcagattattcatataaacaactctgttaaagctttggctgtttatcacagatactgatgagctgcattatattaaaactgaatgtgttagtgatctgtatttaatgttctagtggctcctggtacagtccagaacaaaactacttttccctctagatataataaaatctcttaagtgagaatattggtataacagacatgtttctacctcatccttttcatttattgaaattttctgtgtaaatcatccttttatgtagaggatcctatatagatgtcccctttttgtgcagttttaatatgttaaatactcaattttaaacagattttcccaaaggtatgggcagtatcacaggagtgggtttggatattggcattagaaaaactattgtaaaatatgttcatgtttcacctgctcaaaaatataacatttcaggagataataaatctagaattgatgaagatattaaaacactgaggcatttagatttcaatttccaaagttcccagatttttaatattttaactttgtgaataagtttctagggattctcagtgcatgagattctgtaaccttaactttggagccctgggttctagagatgattgatcagtcataagctggcagagttgtcctgctttccaaggttataataccttcaaatactcattgctacaaaaatgatggcattctcatttcaagtttagatctgatcattcataaaacagcctaaacttaagagtttccacagtccataaagcatcaaaagccataaaataattcttttttccctattaaagaaaaagccaaaaatatttctgtattttagaataaacatttccagttccatttttaaaatattaacaacatgtaaatttaaatgcttttgtaactgataaaatgttcttttgcatatttccctaccatcctcctgcccttcttcctcaatttgctttacacccctaacattaacattctgtgaacaaatttttaagggttgttataatgtattctatttgtatcctacagtaatttatttgcattttaaaaggagtttgaatacagtgtggcaattttgacaaccagcaagctcatcaaagtaagattctacctgtaatcttatgatacaccaaatgcctgctctattctgcctaacacagacaaggatccatctttacagatggaaagaatagctgacatctagtagcacttactctttgagttccctgaactctatttctagtgtatgaatcactcataacccacttaaattcagattgctcaccaaagcgattaggaaaaaggtttttcctactgggtacaaagcataaggtatttcactcttgtagttgttgtgaataacctagtttctgtacataagctggctggtcagtgatttatatctaggataatgaagtatgtgtgactgcagcaacatatttaaacaaatgatgcacaatgttgtacaggaatattacctgtattaaataggagtaaaacattttcattcataggctgtctaaatatcaatggttaaattactgagttttgctttatttttactccagaagtatttgttgagttcctactacatgcgaggctcttgactgagataactaataagatccttataagatttttctattccagagtttggttgtttagctttgaattacccattctttaatacctaacttgacttctagtagttctttacttattagactcttcttctaaggataaacagaaaaagactgtgtcctagattttacttttgaataggcaggtgacaggaagctgaaaccagtggcttcaatgagatttaggtttcttgtggttttgaattttctatatgacatttctgttatcattgccatttgactaaggaactatgtttactggttttgtaatagtagcatctattcttttggaatctggactttgaacaattcgtttcacagagtcattgaacagccagttccttctctcttacttagaatttttccagggaatttttcacatggcaggataatggaagaaaagccatttgggtaactcttctgttacatttgtatccctccccccttggatccctacagataaattcttaccttctcttcctgctaattgaccagcagcaccctggattgctatcatccctttgtccaaagaaatggtgtagctgtattcaaagacctataaaatgttatgtgctatctattgctacctataaaaaatacctttttttctttttaaaatcaggttgttttagaataaataaaggaaaagtcaattaatggaaaaatttcaagaacagttcacataaaattttggtctattttaatttttttttttaccttttcaaatcacattttaaaataagcagttggagaaaatgtaaaatgaaaaatatgtaaagaatagttagcattaaacatcagatccaattgtaaacttacgtgagataatatggatttatatttattttctagtaaaataaaacttatatgattgcataattgattattgtatatgcaatacaaattaagttcaaaaatgaaagttgagctttttttgtcctttcaaatgtagggccagcatacaattttaagagctatttattataaaattcatggtgaatcactatgaaaattgatttttccttgagcttttaattacattatccatattcccttacgaagttttccaagtatagaagacctacttaatggagcagtaatcaaatgcaaacttaatttaatgatctcaaataaaaggttctacttttctggaaataagattaaaccagatattaaaattatgtatgattataaaagtaaagattaccattattgtaataattgaccaatttagtactttcaagttatttagttacattttctcagttctagtttggtgtggtaaagcattatttgaaaaggcagtataggaagaatacagatagtattcttcagtacagataataccgctgtacagtacagataatattactgctattacagaatcagcaagttgaatgcatgcttcagggaatagggacatgaatgcggactttttctaactgacttagatggtctgtctgacctctctagaaaaatatgtgtgtatgtatattttgaaatatataaggaatgttaagtctttctcttcccctttttagccttagattgtaagcaaaagaaatcaaggtcaagatctggaagcaagaagaaaatgctaacattacctcatggtgctgacgaggtttacattctccgatgcaggtatatgcctatattgccaaatctgatcagtttcttcatactttgctttgaaacatattagctatttcatttgggatttttaatttgtggcagagtgcattctcaacaatcaagttataaatgaacttttggagataggcttaaaatcttaattcagctcacaatatccgtacttcaacaactaatgaatcaagttttttacattagccaatagtaatgtaaatctattatactgtgatttattaaagtagcttggccaggtgtggtggctcatgcctgtaattccagcactttgggtggccaagatgggtggatcacttgaggccaggagttcaagagcagcctggccaacatgatgaaacctcgtgtctactaaaaataccaaaattagccaggctttgtagcgggtgcctgtaatcccagctacttgggaggctgaggcaggagaattgcttgagcccaggaggcagaggttgcagtgggccgagatcgtgccactgcactccagcctgagcgacagagcaagactctgtctcagaaaaaagaaaaaaaaactggctttccttgtgtttatttggtttgtatggtttaattttgtttggtttgatgttttgttgtcttgagttctcgcttattgggaacacattttctctcccctcatagtcacgccttcttccgtactcacactcacacacaacacacatgaagaaacatagacacaatgccatttaaggaatgctaaactggggaagggtcttttctaaagaatgacatattttggagtaatagttgttgtttcaagtgaattaagatgtgtagatgttaattttaaaataataatgctcccacctatacaaagattactggagtttattatagctgttaataaacatatgaattgggagttttgatgttttattaaatcatttgactttagaaactttatcaattgctgtctttaaaatatgataaagtttattccttatgttttaggattttgtgtgaattagttttaaagaaagagaattggtcatgttaagagaattgttatctttctgtaggttttgtggcctagtctttcgaggacccttgtctgttcaggaagactggattaagcacttacaacgacatattgtaaacgctaatcttccacggactggagctggcatggtggaagtcacgtcactacttaaaaagcctgcctccattacagaaacttcattttctctactaatggccgaagcagcttcatagaaccaggaaaccttttaaatagccagtttgaattggatgtaaatttgaaattctttttttttaagccacattaaattatctgtttataaatactaaagcaggaaaatggggggaaagtgaattacagtgacatcagagcaaattgaatacttaaaacagtaagtagtctatatattttatatagggtggaagatgtgtttttaaggtttatgaagttttgttggttaactgtgttcactcagtaaaagagcagtacatgtaagcagccattaataaactgttgcacatggatacttatagacagacttattggacaattatgttttttgcagtgttaccagaatcaaggctctgtttattccccacaagacttgcatagaaaaataagatattatattttgtttgtatgtatttagtgttttgtataataccaagaaccgctgactaaatttactcaaattagggcattaaatatcatgtacttcatagtttgagactgttcactcaaatagggcagagtactattctatctagatgtgtaagtgttttttttaaaatcacatggaacggttttttttatactaaaaagtggagggagatttgtttaaacaagtatttctaaaagaaatatgtacatagttctggaaattatttgtggtaaggaaatattctttactccagttgcatttctcagacaataaagtggtgcatccatgctacctcctactttgtcaacaaagatgctatttaccctttacatttttgtatcataatagattttaaaaatctaatgttctttattgcaagacattcttttgttaacaggtttgtttctttttaatgttttacctaaaatttgacatgcttacaggacaggtttgcctcttactttatttaacattgtagaaatgtaattaataaacaatgctcactacacagtttagaatagacgttctcatttatattatcttccaaatttgatcagttagcaaaacttaatacaccaattaaaatatttctacatatgagaatgtttacaatttaaattttagaacttgttttggatgtgattatatgtacgaaaatcgtgtaacactatgctcatgctaagaaccgacataacagaattactgaaataaatgtgctgtgaggaatggaaaatatggtgcaggtgtcttggtcatgataaattgtgattctttttaaaaattttttccaaaaacaattaggtattttaatctgaaatcagattcctttacaaacaacaagtttttgtatgcaagcaccattttatttcatgtagtatggctaatactatagttgaaccaaggatatgcattgattctttgcttcgtatgtaaataaagttaaaaacagttaaaataaggagtattttggtagagtatatacatacctcactgccagtgaaattgctttcctatggtatatctccttaccagaaaaatctctaaataaaaaaaggtttaaagaaaattaaaatgtgaaa

SEQ ID NO: 242 - DNA, 26006 bp, Homo sapiens
tgtgttaaatgggcttgccaacaatatggatgatttgaagataaacaccgatattactggtgctaaagaagaactcctagatgacaacaattttatctcagacaaagagagcggagttcataagccaaaagattgtcaaacatcatttcagaaaaataatacgttgactctgcctgaagaactgtcaaaggacaaatctgaaaacgccttaagtggaggccagtctagtctatttatacatgctggtgctcctactgtttctagtgaaaactttatcttgcctaaaggagctgctgttaatggaccagtttcacactcctccttaactaagacttccaatatgaataaaggcagtgtttcattaaccactggacagcctgtggatcagccaacaacagaatcttgttcaactttgaaggtagcagctgatcttcagctgtctacaccacagaaagcaagtcaacaccaagttttatttttgttatcagatgtagcacatgctaagaatcccacccattccaataaaaaactacctacctctgcttcagttggttgtgacattcagaattcagtagggagtaatataaagtcagatggcactttaataaatcaagtagaggtgggtgaggatggtgaagatttattggtgaaagatgattgtgtcaatacagtaacgggaatttcctcaggtacagatggatttaggtcagaaaatgatacaaactgggatccccaaaaagagttcattcaatttcttatgactaatgaggaaacagtagataaagctccacctcattctaaaataggtctagaaaaaaaaagaaagcgaaaaatggatgtaagcaagataactcgttataccgaggattgctttagtgattctaattgtgtacccaataaatcaaaaatgcaagaagtagactttctagaacaaaatgaagagctacaagcagtagactcacagaaatatgcattatcaaaagtgaagcctgaatcaactgatgaagacttagaatctgtggatgccttccaacatctaatttataacccagataagtgtggagaagagagttcacctgttcatactagcacttttctttcaaataccttaaaaaagaaatgtgaagagagtgattctgagtcacctgctactttcagtaccgaagagccatcattctacccctgtacaaagtgcaatgtgaattttagggagaagaagcacctccacaggcatatgatgtatcatttagatgggaatagtcactttcgccatcttaatgtcccaaggccatatgcttgtagagaatgtggacggacatttcgagatcgcaattcacttctaaaacatatgattattcaccaggagagaagacagaagttgatggaggaaattcgtgaattgaaagaacttcaggatgaaggaagaagtgcacgattacagtgtcctcagtgtgtgtttggtaccaattgccctaaaacatttgtgcaacatgctaaaacccatgaaaaagataaaaggtactactgctgtgaagagtgtaacttcatggcagtgacagaaaatgaattggaatgccatcgaggcattgcacatggggcagtggtaaaatgccctatggtcacttctgatattgcccagagaaaaacacaaaaaaagactttcatgaaagactctgtagtaggatcatccaaaaaatcagctacctacatatgtaagatgtgtccttttactacttcagccaaaagtgttttaaaaaagcacacggagtacttgcattcatcatcatgtgttgattcatttggtagtcctcttggacttgataaaagaaaaaatgacatccttgaagaacctgtagatagtgatagcactaaaacattaactaaacaacagtcaaccacatttccaaagaactctgctttaaaacaagatgtgaagcgaacatttggatcaacctcacaatcaagtagtttttcaaaaattcataagcggccacacagaatacagaaagctcggaaaagcattgcccaatcaggtgtaaacatgtgcaatcaaaacagctctcctcataagaatgttacaattaaaagcagcgttgaccaaaaacctaagtatttccatcaagcagcaaaagaaaagtctaatgccaaggcaaatagccactatttgtatagacacaaatatgaaaactataggatgatcaaaaaatcaggtgaatcatatcctgtgcatttcaaaaaagaagaagctagttcattaaattctttacacctgttttcatcatcaagtaattctcacaacaattttatttcagaccctcataagcctgacgccaaaaggcctgaaagcttcaaagatcacagacgtgtagctgtaaagagagtaattaaggaatctaagaaggaaagttctgttggaggggaagacttggatagctatccagattttttgcataaaatgactgttgtcgttttgcaaaaacttaattctgctgaaaagaaagatagttatgaaacagaagatgaaagttcctgggataatgttgagttaggagactacactacacaggccatagaagatgaaacctatagtgatattaatcaagagcatgtaaatttattccctttatttaagagcaaagtggaaggtcaggagcctggagaaaatgctactcttagttatgaccaaaacgatggcttttattttgaatactatgaagatactggaagtaacaactttttgcatgagatacatgatcctcagcatttagaaactgcagatgcttcattgtcaaagcatagttctgtttttcattggactgatttgtctcttgagaagaaatcgtgtccttactgcccagcaacatttgaaacaggtgttgggttatcaaatcatgtcagggggcatcttcacagagcaggattaagctatgaagcccgtcatgttgtatcaccagaacaaatagccacaagtgacaaaatgcagcatttcaaaagaactggcacaggaacacctgttaaacgagttagaaaaggtaagttctccatggggatgatttgggctgataggtctgtgttctaattctgaagatttaaaagttttttttgaatttagtctttattagaatcataattttatgtttcagaattaactcattttagggtggtcagtttatataagaaagtctgatattactcttaaaaatttttttctagctatagagaagtctgaaaccacttctgaacacacttgtcagctctgtggtggttggtttgatactaaaattggattatcaaatcatgttagaggccacttgaaaagacttggaaagacgaaatgggatgctcacaaatctccaatctgtgttctgaatgagatgatgcaaaatgaagaaaaatatgaaaaaatcttaaaggcattgaacagtcgtcgtattattcccagaccatttgtagctcaaaaacttgcatcaagtgatgactttatatctcaaaatgttatacctcttgaagcataccgtaatggcctaaagactgaagctctgtcagtgtctgcatcagaagaagaagggctgaatttcttaaatgaatatgatgaaacaaaaccagaactgcccagtgggaaaaagaatcagtctcttacactcatagaacttcttaaaaataaaaggatgggagaagaaaggaattctgctatttctcctcaaaagatccataatcagacagcaagaaagagattcgttcagaaatgcgttcttccattaaatgaggatagtccgttgatgtatcagccacaaaaaatggacttgactatgcactcaggtaagaggacgtttatgactatgctatacacagtttaaatgcagttcaattatgccttctttaatggaatctatgtggaaaatactttctcacaatcttcctgtttaagctgctttttttttttacagagcacagattggttattctactgtcatttctgtataactcatcaattgatgctcattagcactgagttctctgtgcctcttttcttggtctgaatgtaaggtgagaacaaaagcagaagaaaaccacacacacacacaataaaaacaacaaacaaaaagctgatctgtaaaaataaaacttgctctggctggaggatggttgtggatgggaggttgatgttcaaaagcatagcattattgaaaaggcatacctctgtcatatttttgccagttctccaaggtgatcatgttttcaagatttagctgttggtttttccactgcttaggtaaaacaaaacagactcttaaagctgaatggattggtgtctgttgtgattaacccaaagaaacatctccctctccaattcctcattgtattgcggaatagtttggttttggagaacagttgtgaacataaaacatatttgtttggggttttaggttttaagatagtgctctaatggaacaggacagatgatttagcttagtgctggtgcaccaatagtttttccttttgaaaggaatattttgtatgtattggcaaataatgtggcagataaagtagccaaactttattcagtattgccaagtgtggtttatacttttagactagaaaaattttaagtgttttttctagatttctttttgaaggttaatgttgaaggtttatgtaaatggtctcatgattagagctctaagttgaatgtgtcagaggtaatagttaatggattaataacgactaacattactgtaaagtaatgttgtttatttgctttggggcagacattgtgatatcccaaatagttgtaatgcagttttgatttaaggaaagataactttgtattgtaagtggtctggaaagcagtttatcttgtatgagcttctgtttaatccggctttttctttcgaataaagagtctctgaaagtcaatagctttcaatattttttcagaagggtaaaacgcagggaagatgtgttagctgtgttgaccaaggggtagtatacttcagagatggaaagcatatttgtggctatcacagtaatgctgaagaaaccagttgaaatgtgttgggggagtgaggattgtctgagaagttaggagtttcttattgtttgaacatgtttttcctgtgatgactaagatgttagcttgttgatcatttatttagcacaaagattttagcaaaaaactttaaatcattaactttcattattgattgcgcattcagagtaatgaacataaaataccctaaataaaatgttgtgtctaacagctgttcagtggtgtgttttaccaccttttctcccagccttcatcagaaagcctaatttagtattgagacttttacggttttgtgggtaaaacactttaattaccactttgtcaactagactttttaattctttttattggtaatgttgtaagctttgaaacttctcaacagaaccgtggtgttcaaatcacaggattgtattgtagtaggtttaagaaataatctgcgtaacacagaaatctgcaagaaagtaataataggtgtatatccagaggagctcaaaggttcaagtcactcctcgtctacctttccaaagagcatgagttgactctaaatactaactacaaactaataacagttaacttaatttcccctccttattttaagttaacctatttcattgaacgttttgaaaaccatctttattgtggtgcttttctacactctttaagctaagaaaatttcactttttgaagtgagaactggattatagttttcttttgaatgataggtatgcctgtgaagcttagaacatgtgtgcattgcaatacgacgtttacaagtgctgttagcctgtccaaccacttacgcgcttatgcacgaaagaagagtgctggacttttgactggtacaggtatgtttgaacagatatcacagcaagtctgtttgatacaatacactttttttttccccaccagactggtgttaattcagatcatatttatagctttctttggtaagctgcatttgagtctgaatacccattgaatttcagcaacttgtaaactgttagatgtaattctaagcaagttaatctttttcttttggctcttattgacttaatttgggggaaaaaaaattaacccaagaggtgtggaactttgagtctaccttaatcccatttcttttttagaatactatttttgatttttaaattgattttagattccagtaaaacacctctctttatagttctagtcaggctcagtggtgtgcccctatagtcccagctactcatgaggctggcaggaggatcacttgagctcaagagttagcggctataatgtgctatgattgtgcctgtgaatagtcactgcactccagcctgggcaacatagcataaaaatattgtagttctagcttggggaaatcctttattagaaaaggaaattatagggaaatttcaaaatgtagacttgattaggaaactaagcaaactaatgaattttcattagtctatagattagatctttgaaggggtgagccttaataatggcttgtgttgacaagcgaatagatttttcttttaatacttcttaaatatattaaggattaataaatttagctatgcacataagtgttaacatgcacatttctgtgttatttttggttggttagcccaaccttgcagatacctcttaatactgctcatctgtgaaaattttattagcttacttatatgtaatacgcttcttataacctacaaaatgctttgcactttcatttgtagtcttttaagctaccctgcttcagcaaatctcatttccctcacatcttaaaatataccctctttttgacatagatctacataaattcttttgcctaaaattctttccaatcattttatttctcttgctcttttttagatcactgcctcctgctttcttctagttgttttcccagcttttttgttcttcctcatgtcctagaacttagatccaatatgttcttgctttcaaaaaaccacttatatttatactagtgtctttcttctgcttctttgcattcttccttaacttgatatacaaatgaccagggatgaatgttgacaatttatattaaaaagagaggagtggggtgagttttagtctactggattaggcctcctactctgagattataatttttatataccctcacctttatcaggcttggcaagtgattgcagacattagaggtggggaacaataaaaataagagactatacaagtaggaaatcattattgttaccatacttgctaacttttattgaacatttactatgtgtcaggcactatgctatgcaatttacatgcataacatttaatctttacaacagccatacaagttgtaggtactggaattctcttaacgttttataggaaactaggacttaaagaacttaatttgctcaaacttacacagttaataagtagcaaggttgtaattcaaatcagggctatcttacctaatctttgtttttaatcactattctctaccttacacaggcggtctatttttgaatttcttatttttaaaataagaaattgaaataaaaataagcaatggaaaattcgaaaatgaaggtgggtttgtttatttatttatttattttgagacggagtctcgctctgtcacccagattggagtgcagtggcgcgatctcggctcactgcaacctccacctccctggttcaagcaattcccctgcctcagcctcccgagtagctgggattacagactcacgccatcatgcctggcaaatttttttgtatttttagtagagatggggttttaccatgttggacaggctggtctcgaactcctgacctcaggcagtctgcccgccttagcctcccaaagtgctgggattacagccgtgagccaccgcacccagcctgaaggtgggtttaaaatggggactattctggtgaagactgaataaataagagtctaattaaaaagagcagagatccaagaagtgcttaggcctaaattagactttagaggagttaatgttccattctgattattcaagcagattatgcaaatatccaataaggcaagatatctccagtccagattttattagtccattaaaaaaatgcttttacttcatctgaaaattctgcaaaacacaggattaattacttataaataactggtagtaaatctccatttaccaagaatgcacttatgaagattatctaaaaaatcttcattatcagagagaaaagtaatgtaggatgactgggaatatgtttaggtcctgaagaataaaagagggtgttattttaaaaatatgattaagtactaccaaaatattagaagtactaggaaatagaaagcgtgtgtttggcagtcctaggcaaagaaaaggaaaatgagaaactgaagaaagcctagggtcttattttccacacccagtagccacttttgagaaactttaaaaactaatgcttctttttcttggaaattctgaaacattttttccctcattaaaaaaaatcttcttgatcagtagagctatacagatgtctttgctgcttattcatgccaactaagaagttttttttcaagctttattaacttttctgttttccagatagagaattctgtattgtatttacaaactccacatactgattatcccccatatcaatatcactgttataaagcagtgttcctaaaaacctatggccctagaaggttccacttggttattataagtgattcattaattcatatgagtaacaggcatcatttttcaagaacacatgatcttttaatgaataaaatgcaaattcatttttataaaatcttaccttagtatatcacaaaattggaacaatgtaaagggaaagtagataggaataaagcctccctaaccatgtccagtatgtgtatttctagtttaagcagtcttaattcatgtagattttaagttgtgtggtccactcttgaatacaaagcttagataccctcagactaaatggtaaaggcctgcttttggttacctgtgatagaataaactttcaagccttcttagaagccacagctcctggtcttttctgtgggaactggtgaccttttgagggaagaaaaatatttcttctaacttataatctcttcaagtatcctgaatacactgaaaaggatatccctcttcttcccaaaatacctgtttactggtaacttaaatacttctaatgtgatggttctcaatctttactggggtcaccgacatctttgagaatttcatgaaagctgtgggccccatcccagaaacatgcacttatttgttctcagataaaaatttttgtgtgtatagactttgcgtatctcctgaaggctatcatcaatttgtctgatggcaaattgagaaaggagagatgccagaataaaaggaaagtagaaacagaactaggaatcagaagccttaagaagttcttttttttttaagagcagaagatgcttaaaatgcaagaattgcataatagcaaaactaattgtggggtcattatcttccctaatatttgtaaaaggaaccgatgggggaaataggaaagatttagaattgaagatttggaagaggtgggcagacttgggagagttaaattgtcataaaagaataatttcacagattaaagttttgcccagaactgtcccagtttatcttctgttgggtaggttcaaataaattgtttaataatttttctgtgtcttcacttgtagataatttatgaagctgttttacttcctttccccgatcaatctttatcaaaatagactagaatcaaagggtttattttatatcctatattgtaaatttaaggcagacttcttattcaagagtttattctagttatttatggaatgcagtaatggtaggggttttttttttttgagattttgttctctttaatgttttacatgctcatacagatttttttctggttaattttccatacagtttaatgagaacattatatagttttcattaaatattgaaattttataatgtagcttatattaattacttctggactttttattttactgattagctttttttgtgcctaatgttttaattaaatgatgtatttttatgctagccatattaagaacatagttctattaagttattaatggagtgactatacatactggtttaccttgttgtcacacctaagtactagtgcctcttttactctcataagtgtcctggattgaatgataaattaatcatcctggttattaaaattgctaaagcatttaaaattaaggtaaagcatattctatcaacctaatctgcaatcaggaaaaaaaatatattttgaggtcaaaataagagtgaatttcaacaggtagggaaagggaaatacagagtagagagaatgttgttaaaggaagtagatctgtcagatgaatgccacaatgcttttctatggtagatagcatgttgttatcttttgtaaagaagaaacaatgatggtagcagtcagcattttaattgagactttattttatatcttgaccacatgtacaaacttacattaatacaaacacacaattccttgtgtactcacctaaatgtactttaatattttcttttttattatattctttgttgtgaaaaattaatgctggtcatgagccagtaaattgatttgctacccacttaagaagtcactatcatagattgaagacactgccctaactgcctctttctcttaggggttggtactgaccaatggtagtagtatcttagatgtcataactcttctgtggcagcaggtgaattttctatactcattctatccacatttttctctctagatcacttttgtaaatcaaatgctaacctctgggacttaaagtaattggaaatttctagttactcatttaaaattaatgcaagaaaaatatttttatatttgggaggggcttcatttcattatcttcagaacaattttgtgtgtgtgtgtgtgagacggagtttcactctagttgcccaggctggagtgcaatggtgcagtctcggctcactgcaacctctgcctcccaggttcaagtgattctcctggctcagcctcctgagtagctgggattacaggcacacgccatcacgcccggctaattttgtatttttagtagagatggggtttctccatgttggtcaggctggtctcgaactcctgactttaggtgatccacccgcctgggcttcccaaagtgctgggattacaggcgtgagccactgcacccagcccagaacactttcttgatacgttttggaagtaaagcccaattgttgctattctacaacaaatgacttatccatcataattatttgacttttctgatgaggtcaataccactagtgcaatatattaacgtttttaaaaaatcaagtcagtgttttatttttcataccatctacttttaagtgtaatcgtagtaggtttcttttgcctgttttcagctttaatgatataattggccacacaggactgtaacaagtactaatgaacatatagcacagtatcaagtgctgaatgggtttgtaagccactagaaaagtcattcttatgttgtggaaagtgctatgggagcactttctgatgtgatagaaaaaatagtattgtgaaagcttcccaatgtgcattaaattatttgttcattcatgagtgtcactgtagtgtcttttaaaaataatatagtattgcatgtttgaaaaattgcatgttttcatagtggttcattcagactgaaagagtgtaagtagaaaattttgatcttcttattaagattaaactccaaatgagcaaacttgcttctgcttaaagcaaactccttgacaattcttccagactgggctgaggagggtatgtgaaaagtatgagacatgtctctgctgtcagagaaattaggaaaggattgttgacaacatacataaaactatcaaaaattgaaaactatgcaagatagtatacaactaaatggcatattggctttaagtgttgtaggagttcaggttgattattttagtctaagcctccttttgagggcagctgggaattgagattccttttttttctgatgcccttactgtttgtctcattgaattagagcttgtaaaaaacagaaaaaataaataaataaaagtagttcatgctggtatgcttcttgtgactttttaaatgcaagagaacaacaaaaccagcagccatacaaaattttattcattcaacaaaagtttgagttcttgtaccaagactgttcatcgctgagccagtaaagatactgcactccagctgcataaacataatataacccagtgggaaaagatcaagtatgccattacagaagggtttatatggtttcagccagaccctgaagttgaaggatgcagtagagttttaggaagacgagatgaagtgtagaatatttcaggcagagaagaacatagtgtggacacaaagggatgaaatttggacttcaagtgtcaggagtggaacttggagttcaagtgtcagaagatttggttacagatgtttggtaaaattgtagtgccagaaaggtggggttggtgctttgaatgcttggtaaaaaaaattaggaagtcattaaaggatgttttaaaaataaggaggccgggcgtggtggctcacacttgtaatcccattactttgggaggctgaggcaggcacatcacctgaggtcaggagcgtgagaccatcatggtcaacatggtgaaaccctgcctctactaaaaaaaaatacaaagaactagccaggcgtggtggtatgcgcctgtaatcccagctattcaggaggctgaggcaggaggattgcatgaacccagaagctggaggttgcagtgagccgagattgtgccattgcactccagcctgggcaacaagagcaaaactcctcaaaaaaaaaaaaaaaatcagcccagtgtggtggtgcgcgcctgtaatctgagctactcaggaggctgaggcaggagaattgcttgaacctgggatgtgcaggttgcagtgagccaagattgcgccactgcactccagcctgggcgacagagtgagactccgtctcataaataaatacaaaaggaaaataggccaggtgccgtggctaacacctgtaatcccaagcactttgggaggccgaggcaggcggatcacctgaggtcaggagtttgagaccagcctggccaacatggtgaaactccgtctctactaaaaaatacgaaaaagtagccaggcgtggtggtgggcgcctgtaatcccagctactcaggaggctgaggcaggagaatcgcttaaacctgagaggtggagattgcagtgagctgagatcatgctgttgcactccagcctgggcaacagagcaagactccatctccaaagaaggaaggaaggaaggaaagaaggaagtgaaggagggaggaagagagggagggcagagagagagagaagaaaaataagggaatggtatggttaaacttatattttaaaaagcctttcatgagacagagaaaagatgggtctttatatttcttagctataacttatttctatagtattgttcttcattaagagcatatatgtgtatacatttatctgcacagtaacgtatcatttataagtgattagcaaggtaacgaattatctgagttgagtaaattctctaggtgactgaagaatagtcctttaactgttaataacttgatttttcctaaccattttggtggttattgctccaaaatgttgttcttatttttgccttgagtagcttggatataatttaatcgagtattttgggtaacccttatagatactctactaattgttttattattccagcaagaattaggctatttctccaccatacaaaaaaatgatcggctgattttttcactaattcaacaagcacttttttcacctccaactgtgctaagtatgcagagatacattggatcttacaatacagtagaagcacatatatgcataactgtaatacaagacaaattgttaagtgccattggagaggtatgcgtgaaatactgtggaatttcagagaaagaggaagacactttcagctagactaggaactcccaaggcttttggaattagcatttgaatggaccctgatgtatagctaactgaaatggaaatgggggtcggggtggggaagagaaatgcctgaaagagggagcaaggtggaacaatgtgggaagtttataggaaatactaggaagtaggaggtaagggaattgagttggactggtaaagtgagtcagatagatgacatagaacgctagtctaagatgttggaattaactttgtagtggggaactatttgaatgcagaatttgtgtaatgcttttgaaattgctttttaaataaaggatttggcagagaggaggaaaaattgcagggtagatcattttaagagtcctgtaccaggtcagtgacattaagaatgtaaaggaggggtactagatgtatgggtaatattatggaaataaaataagcaggatatggtagattagagttaagagatgactcaagattttaaatctgagtgggaggaggatggttataccagtacagttaatcaatctgctaccatgctgtctggtagaagggcaggcttcattacttctctgtcatttactagcaacacttcaacatccagctatccactataacaaagtatcaccttaaaagcaggagatctacaaatttggaaaagagagctttatttcttaggaagcttgaagcctgcaggcttggaagtgtatcctcagacagagaccaaaagcaagcccttcaaaggaggaagggtgagacaggaagttatgttgaatgggttggctaagtatacatattcaacagattataggaggagctatgaatattcatgagggggtgcacacaagcttagtgtgcacactccatgttacatacatcccatgttcactttgagttggagacctaacatttaatcatagtaaaattaaggtttacatgtcaaaaggtgaaacagagttcataggcatcctatgtgcagccttcatggaccagctagaaccagttggtgatctcttatcagtaaggaatgctggtcagttcaaaaccacaaaaacagagtggagtctggcttctgagttaggcaattggttgatatcagtggggagcaagtcttttgaaagggttggtttctttttaactcttaggaaggaaagttttatggtggttagtgagggaggggacctaacgagacttgctttacctcctgtcccatcatggctgggaactcaatttttaaggtttctctggggtcaccttggcaaagaggagggtgtccattcagtctgctgtagaacttagaattttatttttatttctcaaaagcaaataaccacacttgttgaatcagtaagtttgtttttaggagaatatagcctaagagttacaccattgtagcataaaatacttaaattttatgatgcttgttttttgctgctcattggtttcataaggaaggtgatctattttgactgacatcttgtttttcatgcaagtcttatctagtttcctagcattactattggtttaattatttactaagtttctgggttttgcttttttttttttaatatatgtttgggaatcttaaatatatctaattatatcttcagttataatgtttgtgtttgctatgatttttattctctaagccttaaataatgagattcagaaaatatcattaggtatagagtttattcaagcccaaagcttgaggatggccacctgggagcataggttcaagttgccctggcatatacactgtgattagcagcagttacaagtgtatttttaagaaaaaaagcggtttctatgtttatttaccaagaatttacattaagataacgtaagctatcgattggctatacattgttctttgtatcacagatttcaggaacataaaaataatcgggtgaggcatcaggtcaggaacataatgaatgcctagtttaaacaattgccctccccgcagtgggggcatgagagtcaagtgactgaagtcccctactccagtctttctgggcctggtaaatcttgcatactgtgcatagctgactgctgagctgctttccttctctctaacatgaatttcttgaatgcggtttgtaatctggattaagatagaattagcccttataatataacaaggcatgtggttggccagagctaaattttaggtaatgttttaattgactttacggaaataataaaataacactcagactttctctattggaggttagggcaaaaggatggcttattggtaggtagttcctcacttactgcagaagtagaaaaaagtagaaaagtagaatttacttttttttttggtatgcctagggtttgaagaatgaggttaattcttgttatccaaggtttatgtatttaattgtagcttagctggaagttggctaaaacagaaaatatctgatcaataccatgtttggttatagtttgaattttggctggaattacacgtgtaaggctcttgagaactataaaaagccaaatcagatccattgcgaccatggatttgtgccatttagatttactaatatattgttgtgagtcctatctaatttaaggtaaatatgattgtattgaaaataatttaaaggaaattttaaagttaggtggttttcttagctaattttatgatcaagaacaatttaattattgttactacatctgaaatgatatatcagaaatacggagattttagagggcagggactgtgattattttgtttgtaattctcaacaaaagtgacttaaagcagattgtcattatgtactttaatgtttattctaatttcagatgtgtcttacaaaagtggttgatgttgatggctaatgcctattttgcttaataaaacggcatacaagtccaacttacttgaaaagaaatttttaaatgttattttcttacctgttaccacaaagaagtaatacgtttgctatcctatcaactcagctgaccagtaagccacttgtagttgtgatattgttagcttttttagctttgggtaagctgataaaactagcctgcctctaattcctgtttataaaaatgtgtgatgaagtatcatatttatgtccagcttttccctttatttacatagagaatacttgctcaaaataccctttagtaatcatcccctctactttgaaatagtggagtcttctacaaattgtactttttctttaactgaatccattcaagtttaaataaaaggctacttccatttcctttaactctttctctgaactataaggctgttgactatacttaatttaacttcctactttgtaggacaaactcaagcaaccagtccttgtggactaataattgtaaaaccacaaacctaattcttaaagcaaaggaaatctgctttccaggtattttgcatttcatcctcttccaggtaaattattaaaacaagcaggaactagttaactttgccactgattgctgtgtgattgagttacttatctttttttcagtcattgggagtggaaactctaaaaattagtgaaagttatttagggtactaaaaaattacccaattttagagtgaaaatatcaagggaaaatgttgatgaaaataaatacttttgaggtgaccaaatgtgtatctttatacttcatgcctgactgtaagggaaacattgctttttataatgtaaactactcatcttgggaataatgaagtggtatagctaggagcaaagaactgatgttgataggagtaggggagtccttttcaattttaatactgtgtagagtggggatttaacaatttttctcagcctttttttttccttttttgaatgggccgagagattgaggggtggaactgaatgcagcctttctcatttatgatagtagatactcaggtcccagggctgctatttgcaaagtccaatgcaaaatgagttatgtggtagacctcgttcaaaaattaatagtttcaaggctgcaacagtagagcattaaactgagtgtggggctctccctatgtgactgtgtaagttggacacccatgaagctggtctcctaggcactttgtacagaaagaaagataaaagctgaataaatgaaactttggcttctcagcaattggctttctctaccccattcctgttttacacaagctagcatgtttttgttgttgttgttgttttctaaaaaaaggccctgattctttttcatttgaggccaaaggaaagaaaattatatttgcagtctttttatatgcttggggcttatgaaccttgaaggattagtgacaacagttataattgaatttattactaacacaggaacagaaaaccaatactgaatgttttcacttataagtaggggctaaacaacgagaacacatggacacaaagaagggagcaacagactggggcctaccttaagggtggagggtaggaggagggagataataaaaaaaactacctatcaggtactgtgcttattgcctgggtgatgaaatagtctgtacaccaactcccgtgacaatttacctatataacaaacctgcacgtgtacccctgaagttaaaataaaggtttaaaaaaaagagttgagtttatttttcttacacttgtgtatcctttggcatgtgtgcatcctcttcccacctcaccactgccagcacgacctccagcaccaactttttaatagtgatagaatgatgatttacctgttcgtgtcatgtttattcctactgtagttctgaatgagctcatagctaatattgtccaccaaacttaacacaggccaaccacttagagaagaaattttcttccctctcgtaggggtatactgtgcctcttactttgggtatagataccccagttgtttcactttgtcctagagataccagcaaccaattagaaaagaaatggattaaacaagacttttaagttattgggcaggtgagaatgattacaaataaaaatacttaggtggcgaatgttaatttagttatggtgtgctttatcaaagaagttccagatgtttttatgaaatctcattctcttgggtcatttatatcgtgaaggaaaaagaaaatgaaactcattgaagcaattattgtataaaatgggcagaaaggtggaaagagcaaaagattttaatgtcaaagtcaaaagtaaattcttaatcttctttgtataaaactaaataatggctcagaaaacagacttgaatttttatgtgttgtgttatctatttatttgctttgcaccaatctggtttagtgctttggcatgttgttgtcgtcatggtcattggtcgtcgtattcatagcatagcagtgtggtgttctttttgaggactcatgagtttattgtatttctctttcatatttgtatttgaccaagacaaatatcttactgaaaggtatattctattttttttttttgcatttgaccttacagctcaatttattctccgtatgagtaaaatattctcagtagcaatttagatcttttataaatcaggtaacttgaaagataacagtcttttggttgaaattgatcacttaaacagtttctgcccaccgaatagtaatcttaggaaggtttggatgactggatttgtttctttctatagaagcttatgcttgagaagaaaattaatactttctaaaaataattttttaatatatttaaagtatagaaacaatgttagatttaaaatactttgtaaagagaaaagagtgtgtgggttttttgtttttaagttccttggagttttttggtcactaacaagtgcaaataaaatcctattacaaaaaaaggctttgtgtaacagttatctatttggcagattattcatataaacaactctgttaaagctttggctgtttatcacagatactgatgagctgcattatattaaaactgaatgtgttagtgatctgtatttaatgttctagtggctcctggtacagtccagaacaaaactacttttccctctagatataataaaatctcttaagtgagaatattggtataacagacatgtttctacctcatccttttcatttattgaaattttctgtgtaaatcatccttttatgtagaggatcctatatagatgtcccctttttgtgcagttttaatatgttaaatactcaattttaaacagattttcccaaaggtatgggcagtatcacaggagtgggtttggatattggcattagaaaaactattgtaaaatatgttcatgtttcacctgctcaaaaatataacatttcaggagataataaatctagaattgatgaagatattaaaacactgaggcatttagatttcaatttccaaagttcccagatttttaatattttaactttgtgaataagtttctagggattctcagtgcatgagattctgtaaccttaactttggagccctgggttctagagatgattgatcagtcataagctggcagagttgtcctgctttccaaggttataataccttcaaatactcattgctacaaaaatgatggcattctcatttcaagtttagatctgatcattcataaaacagcctaaacttaagagtttccacagtccataaagcatcaaaagccataaaataattcttttttccctattaaagaaaaagccaaaaatatttctgtattttagaataaacatttccagttccatttttaaaatattaacaacatgtaaatttaaatgcttttgtaactgataaaatgttcttttgcatatttccctaccatcctcctgcccttcttcctcaatttgctttacacccctaacattaacattctgtgaacaaatttttaagggttgttataatgtattctatttgtatcctacagtaatttatttgcattttaaaaggagtttgaatacagtgtggcaattttgacaaccagcaagctcatcaaagtaagattctacctgtaatcttatgatacaccaaatgcctgctctattctgcctaacacagacaaggatccatctttacagatggaaagaatagctgacatctagtagcacttactctttgagttccctgaactctatttctagtgtatgaatcactcataacccacttaaattcagattgctcaccaaagcgattaggaaaaaggtttttcctactgggtacaaagcataaggtatttcactcttgtagttgttgtgaataacctagtttctgtacataagctggctggtcagtgatttatatctaggataatgaagtatgtgtgactgcagcaacatatttaaacaaatgatgcacaatgttgtacaggaatattacctgtattaaataggagtaaaacattttcattcataggctgtctaaatatcaatggttaaattactgagttttgctttatttttactccagaagtatttgttgagttcctactacatgcgaggctcttgactgagataactaataagatccttataagatttttctattccagagtttggttgtttagctttgaattacccattctttaatacctaacttgacttctagtagttctttacttattagactcttcttctaaggataaacagaaaaagactgtgtcctagattttacttttgaataggcaggtgacaggaagctgaaaccagtggcttcaatgagatttaggtttcttgtggttttgaattttctatatgacatttctgttatcattgccatttgactaaggaactatgtttactggttttgtaatagtagcatctattcttttggaatctggactttgaacaattcgtttcacagagtcattgaacagccagttccttctctcttacttagaatttttccagggaatttttcacatggcaggataatggaagaaaagccatttgggtaactcttctgttacatttgtatccctccccccttggatccctacagataaattcttaccttctcttcctgctaattgaccagcagcaccctggattgctatcatccctttgtccaaagaaatggtgtagctgtattcaaagacctataaaatgttatgtgctatctattgctacctataaaaaatacctttttttctttttaaaatcaggttgttttagaataaataaaggaaaagtcaattaatggaaaaatttcaagaacagttcacataaaattttggtctattttaatttttttttttaccttttcaaatcacattttaaaataagcagttggagaaaatgtaaaatgaaaaatatgtaaagaatagttagcattaaacatcagatccaattgtaaacttacgtgagataatatggatttatatttattttctagtaaaataaaacttatatgattgcataattgattattgtatatgcaatacaaattaagttcaaaaatgaaagttgagctttttttgtcctttcaaatgtagggccagcatacaattttaagagctatttattataaaattcatggtgaatcactatgaaaattgatttttccttgagcttttaattacattatccatattcccttacgaagttttccaagtatagaagacctacttaatggagcagtaatcaaatgcaaacttaatttaatgatctcaaataaaaggttctacttttctggaaataagattaaaccagatattaaaattatgtatgattataaaagtaaagattaccattattgtaataattgaccaatttagtactttcaagttatttagttacattttctcagttctagtttggtgtggtaaagcattatttgaaaaggcagtataggaagaatacagatagtattcttcagtacagataataccgctgtacagtacagataatattactgctattacagaatcagcaagttgaatgcatgcttcagggaatagggaaatgaatgcggactttttctaactgatttagatggtctgtctgacctctctagaaaaatatgtgtgtatgtatattttgaaatatataaggaatgttaagtctttctcttcccctttttagccttagattgtaagcaaaagaaatcaaggtcaagatctggaagcaagaagaaaatgctaacattacctcatggtgctgacgaggtttacattctccgatgcaggtatatgcctatattgccaaatctgatcagtttcttcatactttgctttgaaacatattagctatttcatttgggatttttaatttgtggcagagtgcattctcaacaatcaagttataaatgaacttttggagataggcttaaaatcttaattcagctcacaatatccgtacttcaacaactaatgaatcaagttttttacattagccaatagtaatgtaaatctattatactgtgatttattaaagtagcttggccaggtgtggtggctcatgcctgtaattccagcactttgggtggccaagatgggtggatcacttgaggccaggagttcaagagcagcctggccaacatgatgaaacctcgtgtctactaaaaataccaaaattagccaggctttgtagcgggtgcctgtaatcccagctacttgggaggctgaggcaggagaattgcttgagcccaggaggcagaggttgcagtgggccgagatcgtgccactgcactccagcctgagcgacagagcaagactctgtctcagaaaaaagaaaaaaaaaactggctttccttgtgtttatttggtttgtatggtttaattttgtttggtttgatgttttgttgtcttgagttctcgcttattgggaacacattttctctcccctcatagtcacgccttcttccgtactcacactcacacacaacacacatgaagaaacatagacacaatgccatttaaggaatgctaaactggggaagggtcttttctaaagaatgacatattttggagtaatagttgttgtttcaagtgaattaagatgtgtagatgttaattttaaaataataatgctcccacctatacaaagattactggagtttattatagctgttaataaacatatgaattgggagttttgatgttttattaaatcatttgactttagaaactttatcaattgctgtctttaaaatatgataaagtttattccttatgttttaggattttgtgtgaattagttttaaagaaagagaattggtcatgttaagagaattgttatctttctgtaggttttgtggcctagtctttcgaggacccttgtctgttcaggaagactggattaagcacttacaacgacatattgtaaacgctaatcttccacggactggagctggcatggtggaagtcacgtcactacttaaaaagcctgcctccattacagaaacttcattttctctactaatggccgaagcagcttcatagaaccaggaaaccttttaaatagccagtttgaattggatgtaaatttgaaattctttttttttaagccacattaaattatctgtttataaatactaaagcaggaaaatggggggaaagtgaattacagtgacatcagagcaaattgaatacttaaaacagtaagtagtctatatattttatatagggtggaagatgtgtttttaaggtttatgaagttttgttggttaactgtgttcactcagtaaaagagcagtacatgtaagcagccattaataaactgttgcacatggatacttatagacagacttattggacaattatgttttttgcagtgttaccagaatcaaggctctgtttattccccacaagacttgcatagaaaaataagatattatattttgtttgtatgtatttagtgttttgtataataccaagaaccgctgactaaatttactcaaattagggcattaaatatcatgtacttcatagtttgagactgttcactcaaatagggcagagtactattctatctagatgtgtaagtgttttttttaaaatcacatggaacggttttttttatactaaaaagtggagggagatttgtttaaacaagtatttctaaaagaaatatgtacatagttctggaaattatttgtggtaaggaaatattctttactccagttgcatttctcagacaataaagtggtgcatccatgctacctcctactttgtcaacaaagatgctatttaccctttacatttttgtatcataatagattttaaaaatctaatgttctttattgcaagacattcttttgttaacaggtttgtttctttttaatgttttacctaaaatttgacatgcttacaggacaggtttgcctcttactttatttaacattgtagaaatgtaattaataaacaatgctcactacacagtttagaatagacgttctcatttatattatcttccaaatttgatcagttagcaaaacttaatacaccaattaaaatatttctacatatgagaatgtttacaatttaaattttagaacttgttttggatgtgattatatgtacgaaaatcgtgtaacactatgctcatgctaagaaccgacataacagaattactgaaataaatgtgctgtgaggaatggaaaatatggtgcaggtgtcttggtcatgataaattgtgattctttttaaaaattttttccaaaaacaattaggtattttaatctgaaatcagattcctttacaaacaacaagtttttgtatgcaagcaccattttatttcatgtagtatggctaatactatagttgaaccaaggatatgcattgattctttgcttcgtatgtaaataaagttaaaaacagttaaaataaggagtattttggtagagtatatacatacctcactgccagtgaaattgctttcctatggtatatctccttaccagaaaaatctctaaataaaaaaaggtttaaagaaaattaaaatgtgaaa

SEQ ID NO: 243 - DNA, 344 bp, Homo sapiens
gatatgcaagcttctaatgctaaattagggctttaaaaaattccagtctgggccaggcgcagtggctcacgcctgtaatcccagcactttgggaggccgaggcgggcggatcgcgaagtcgggagatcgagaccatcctggctaacacagtgaaaccccgtctctactaaaaatacaaaaaaattagcaggcgttgctgcgtgcgcctctagtcccagctgctggggaggctgaggcaggagaatggcatgaacctgggaggtggagcttgcagtgagccaagatggtgccactgcactacagcctgggtgacagagcaagactccgtctcaaaaaaaaaaaaa

SEQ ID NO: 244 - DNA, 174 bp, Homo sapiens
cacgccattctcctgcctcagcctctcgagtagctgggactacaggcacccaccaccacgcctggctaattttttttatttttagtagagacggggtatcaccatgttagccaggatggtgtcaatctcctgatcttgtaatccacccgcctcggcctcccaaagtgctgggat

SEQ ID NO: 245 - DNA, 122 bp, Homo sapiens
attctcctgcctcagcctctcgagtagctgggactacaggcacccaccaccacgcctggctaattttttttatttttagtagagacggggtatcaccatgttagccaggatggtgtcaatct

SEQ ID NO: 246 - DNA, 191 bp, Homo sapiens
attctcctgcctcagcctctcgagtagctgggactacaggcacccaccaccacgcctggctaattttttttatttttagtagagacggggtatcaccatgttagccaggatggtgtcaatctcctgaccttgtaatccacccgcctcggcctcccaaagtgctgggattacaggagtgagccaccgcgccc

SEQ ID NO: 247 - DNA, 344 bp, Homo sapiens; identical to SEQ ID NO: 243

SEQ ID NO: 248 - DNA, 430 bp, Homo sapiens
catgaagtcctaatagtgtgtaaacatgtccatgaaaaagaattgctgagttaatcaggttgcctgtttcttttcccaggttttccctatgttcttgtttgatgtctgctggttgggttggtggtcagtggtgattaccagcattcaggttggagcagttgctgagggcttaacactttgcgggagggagttctgagaaactccaccctctggcttagtttgttctagggactgggtgacagtggcattcttcaggcttggtccagtgatcagagagacaatcccgtgggatcttggtgtccctcttgctatgaatgagagaagggtgggggacacacaccaccccacaccaccactgcatacacctaagctggggacaggggccagcaggtcacggggatcaggcattctgctgtagagcaggtcaggt

SEQ ID NO: 249 - DNA, 131 bp, Homo sapiens
aaaaattagcctggcgtggtggcggatgcctgtagtcccagctactcgggaggctgaggcagaagaatggtgtgaacccgggaggtggagcttgcagtgagctgagattgcgccactgcactccagcctgg

SEQ ID NO: 250 - DNA, 1727 bp, Homo sapiens
ttagtggattttccatttaatgctccccatgttatttcaggacctatttaaaagtaataacaaaaaggaacataatccaaaattacatgttttattttcatgtttgtaaaacgaagagcttttttctggatggttttcttatcagcttttcacacaacagtcaagtaaacctcgtggcactagccctagaaaaggaaaaacacgagattcttacaagactacaaacattacaacatatgtaaaagcattaaaagtattaaaaaaaaatattgtccttataacggtccatctcagaagccagatccgtaaaagtttttttttttcaacagaagttcaggttcgggataagatcatcacagataagaccaaggacacaatattcactgatctctaagcaaacagaaaaactccacttacagaaatcgttgcaactttggaacttccaagacaatctggcctctatcaatgggcagacagcgaccctcactgttggcagaaaaaaaaaaaacccaggattttataacacaactgttataaaatcacggcaacaaaatttactccacctctgaattactggtcttaatctcagaagccgaatccgtacttatttttcttcaggttatcagcttcgggataggtttcatcattgattagaccaatcagaccttgtatatgtacacataatacattaaactgcacttctgtgacactgactacaaaccaaggtaatgctaaaaggcaagtattatagtacaaatactacagaacttttaagccatacaacctacttcaaaatgaagctgctagtcagtcacattcgacattcattatcttcactggctactcgtccacactcagaacgctgttcactgacaaaaaaaatttgatttagtctaggtgtggattaaatgctatgctcaatcataaagtactaaaacaacacatacctgttaaaagtgtcaggttttaaccaagcgattttccattaaatattctcccagatgttctggaagttttttcgtgtatctaacaaaaaaaagtaaatttcaaacgatgcaacagttcctattcctgtaaatcaacaggtttactcctttagtttggaaactaagcttaactaagctcttacctttgcatcttcagagctgctccactgtgccactgaagacagcgccattgttcctgcgggaaatcggtatttaagcattctcgcagaaatgtcacactccaaggcgtttttccacacaaaacccttccccttcattaatccgaattgcacacaacgccgccttcgaacagctcagtttcaatacagggtcgaggcttcccattttaaaacaacgccgacggaaggccttcgccattttagtaaaggccctttgctgttaaaactaaccctccgccccaattaaggtggtttttccgccgccgctcaggcacatgccggaggccagcaagttcggcgcccgtggccgatcagcggttcctcacgccaaaactcggagcctgtggccgtcacgactcaacctcagtacatgtggcagtccggccgcacgtttcccacgtgcaagctttcaactctcagcactctaaactcttcactaagatgtcttcacaggattaaagctcttaactcggcctgcgccaccatcttttgctcggatactagcccgcaatacccactcacctaccacccgcccagacgctcgcgaaggccgacgtaaaag

SEQ ID NO: 251 - DNA, 1727 bp, Homo sapiens; identical to SEQ ID NO: 250

SEQ ID NO: 252 - DNA, 392 bp, Homo sapiens
ttggtacccaaatcctcaatatttgtctcagactctgaaccatactgtctttgctcagttatttcttaggcctattgtcccaacatctgtgctggtttagactcaaatccacttgttctattttcaagaatccttcatagcttgacttttccttggcatcttgtgccactgttgacaaaacggttttatttcaggagtcttggcagagcctagcacaagccagtgcatataaatgtggagtactaatttcgatagataatgtgacatattaaaaaatctattgggaggcaagggaggtagaaggagctacaggaaaagcggtcagagggctccaaagcaaccagtctatttcacaactttgtcttgtttgccagctttaacaaaacggtaat

SEQ ID NO: 253 - DNA, 392 bp, Homo sapiens; identical to SEQ ID NO: 252

SEQ ID NO: 254 - DNA, 100 bp, Homo sapiens
taaagagcaatctgacagttcttagttctatatcattgtgcttcatgaccatcaagatccacttttggatgtgtactggaaaaaaaaaaaaaaaaaaaaa

SEQ ID NO: 255 - DNA, 146 bp, Homo sapiens
gcctgtagtcccagctacttgggaggctgagacaggagaatggcgtgaacccaggaggtggagcttgcagtgagccgagatggtgccgctgcactccagcctgggcgacagagcgagactccatctcaaaaaaaaaaaaaaaaaaa

SEQ ID NO: 256 - DNA, 32174 bp, Homo sapiens
  misc_feature (29356): n equals a,t,g, or c
  misc_feature (29357): n equals a,t,g, or c
  misc_feature (29358): n equals a,t,g, or c
  misc_feature (29359): n equals a,t,g, or c
  misc_feature (29360): n equals a,t,g, or c
  misc_feature (29361): n equals a,t,g, or c
  misc_feature (29362): n equals a,t,g, or c
  misc_feature (29363): n equals a,t,g, or c
  misc_feature (29364): n equals a,t,g, or c
  misc_feature (29365): n equals a,t,g, or c
  misc_feature (29366): n equals a,t,g, or c
  misc_feature (29367): n equals a,t,g, or c
  misc_feature (29368): n equals a,t,g, or c
  misc_feature (29369): n equals a,t,g, or c
  misc_feature (29370): n equals a,t,g, or c
  misc_feature (29371): n equals a,t,g, or c
  misc_feature (29372): n equals a,t,g, or c
  misc_feature (29373): n equals a,t,g, or c
  misc_feature (29374): n equals a,t,g, or c
  misc_feature (29375): n equals a,t,g, or c
  misc_feature (29376): n equals a,t,g, or c
  misc_feature (29377): n equals a,t,g, or c
  misc_feature (29378): n equals a,t,g, or c
  misc_feature (29379): n equals a,t,g, or c
  misc_feature (29380): n equals a,t,g, or c
  misc_feature (29381): n equals a,t,g, or c
  misc_feature (29382): n equals a,t,g, or c
  misc_feature (29383): n equals a,t,g, or c
  misc_feature (29384): n equals a,t,g, or c
  misc_feature (29385): n equals a,t,g, or c
  misc_feature (29386): n equals a,t,g, or c
  misc_feature (29387): n equals a,t,g, or c
  misc_feature (29388): n equals a,t,g, or c
  misc_feature (29389): n equals a,t,g, or c
  misc_feature (29390): n equals a,t,g, or c
  misc_feature (29391): n equals a,t,g, or c
  misc_feature (29392): n equals a,t,g, or c
  misc_feature (29393): n equals a,t,g, or c
  misc_feature (29394): n equals a,t,g, or c
  misc_feature (29395): n equals a,t,g, or c
  misc_feature (29396): n equals a,t,g, or c
  misc_feature (29397): n equals a,t,g, or c
  misc_feature (29398): n equals a,t,g, or c
  misc_feature (29399): n equals a,t,g, or c
  misc_feature (29400): n equals a,t,g, or c
  misc_feature (29401): n equals a,t,g, or c
  misc_feature (29402): n equals a,t,g, or c
  misc_feature (29403): n equals a,t,g, or c
  misc_feature (29404): n equals a,t,g, or c
  misc_feature (29405): n equals a,t,g, or c
  misc_feature (29406): n equals a,t,g, or c
  misc_feature (29407): n equals a,t,g, or c
  misc_feature (29408): n equals a,t,g, or c
  misc_feature (29409): n equals a,t,g, or c
  misc_feature (29410): n equals a,t,g, or c
  misc_feature (29411): n equals a,t,g, or c
  misc_feature (29412): n equals a,t,g, or c
  misc_feature (29413): n equals a,t,g, or c
  misc_feature (29414): n equals a,t,g, or c
  misc_feature (29415): n equals a,t,g, or c
  misc_feature (29416): n equals a,t,g, or c
  misc_feature (29417): n equals a,t,g, or c
  misc_feature (29418): n equals a,t,g, or c
  misc_feature (29419): n equals a,t,g, or c
  misc_feature (29420): n equals a,t,g, or c
  misc_feature (29421): n equals a,t,g, or c
  misc_feature (29422): n equals a,t,g, or c
  misc_feature (29423): n equals a,t,g, or c
  misc_feature (29424): n equals a,t,g, or c
  misc_feature (29425): n equals a,t,g, or c
  misc_feature (29426): n equals a,t,g, or c
  misc_feature (29427): n equals a,t,g, or c
  misc_feature (29428): n equals a,t,g, or c
  misc_feature (29429): n equals a,t,g, or c
  misc_feature (29430): n equals a,t,g, or c
  misc_feature (29431): n equals a,t,g, or c
  misc_feature (29432): n equals a,t,g, or c
  misc_feature (29433): n equals a,t,g, or c
  misc_feature (29434): n equals a,t,g, or c
  misc_feature (29435): n equals a,t,g, or c
  misc_feature (29436): n equals a,t,g, or c
  misc_feature (29437): n equals a,t,g, or c
  misc_feature (29438): n equals a,t,g, or c
  misc_feature (29439): n equals a,t,g, or c
  misc_feature (29440): n equals a,t,g, or c
  misc_feature (29441): n equals a,t,g, or c
  misc_feature (29442): n equals a,t,g, or c
  misc_feature (29443): n equals a,t,g, or c
  misc_feature (29444): n equals a,t,g, or c
  misc_feature (29445): n equals a,t,g, or c
  misc_feature (29446): n equals a,t,g, or c
  misc_feature (29447): n equals a,t,g, or c
  misc_feature (29448): n equals a,t,g, or c
  misc_feature (29449): n equals a,t,g, or c
  misc_feature (29450): n equals a,t,g, or c
  misc_feature (29451): n equals a,t,g, or c
  misc_feature (29452): n equals a,t,g, or c
  misc_feature (29453): n equals a,t,g, or c
  misc_feature (29454): n equals a,t,g, or c
  misc_feature (29455): n equals a,t,g, or c
  misc_feature (29456): n equals a,t,g, or c
  misc_feature (29457): n equals a,t,g, or c
  misc_feature (29458): n equals a,t,g, or c
  misc_feature (29459): n equals a,t,g, or c
  misc_feature (29460): n equals a,t,g, or c
  misc_feature (29461): n equals a,t,g, or c
  misc_feature (29462): n equals a,t,g, or c
  misc_feature (29463): n equals a,t,g, or c
  misc_feature (29464): n equals a,t,g, or c
  misc_feature (29465): n equals a,t,g, or c
  misc_feature (29466): n equals a,t,g, or c
  misc_feature (29467): n equals a,t,g, or c
  misc_feature (29468): n equals a,t,g, or c
  misc_feature (29469): n equals a,t,g, or c
  misc_feature (29470): n equals a,t,g, or c
  misc_feature (29471): n equals a,t,g, or c
  misc_feature (29472): n equals a,t,g, or c
  misc_feature (29473): n equals a,t,g, or c
  misc_feature (29474): n equals a,t,g, or c
  misc_feature (29475): n equals a,t,g, or c
  misc_feature (29476): n equals a,t,g, or c
  misc_feature (29477): n equals a,t,g, or c
  misc_feature (29478): n equals a,t,g, or c
  misc_feature (29479): n equals a,t,g, or c
  misc_feature (29480): n equals a,t,g, or c
  misc_feature (29481): n equals a,t,g, or c
  misc_feature (29482): n equals a,t,g, or c
  misc_feature (29483): n equals a,t,g, or c
  misc_feature (29484): n equals a,t,g, or c
  misc_feature (29485): n equals a,t,g, or c
  misc_feature (29486): n equals a,t,g, or c
  misc_feature (29487): n equals a,t,g, or c
  misc_feature (29488): n equals a,t,g, or c
  misc_feature (29489): n equals a,t,g, or c
  misc_feature (29490): n equals a,t,g, or c
  misc_feature (29491): n equals a,t,g, or c
  misc_feature (29492): n equals a,t,g, or c
  misc_feature (29493): n equals a,t,g, or c
  misc_feature (29494): n equals a,t,g, or c
  misc_feature (29495): n equals a,t,g, or c
  misc_feature (29496): n equals a,t,g, or c
  misc_feature (29497): n equals a,t,g, or c
  misc_feature (29498): n equals a,t,g, or c
  misc_feature (29499): n equals a,t,g, or c
  misc_feature (29500): n equals a,t,g, or c
  misc_feature (29501): n equals a,t,g, or c
  misc_feature (29502): n equals a,t,g, or c
  misc_feature (29503): n equals a,t,g, or c
  misc_feature (29504): n equals a,t,g, or c
  misc_feature (29505): n equals a,t,g, or c
  misc_feature (29506): n equals a,t,g, or c
  misc_feature (29507): n equals a,t,g, or c
  misc_feature (29508): n equals a,t,g, or c
  misc_feature (29509): n equals a,t,g, or c
  misc_feature (29510): n equals a,t,g, or c
  misc_feature (29511): n equals a,t,g, or c
  misc_feature (29512): n equals a,t,g, or c
  misc_feature (29513): n equals a,t,g, or c
  misc_feature (29514): n equals a,t,g, or c
  misc_feature (29515): n equals a,t,g, or c
  misc_feature (29516): n equals a,t,g, or c
  misc_feature (29517): n equals a,t,g, or c
  misc_feature (29518): n equals a,t,g, or c
  misc_feature (29519): n equals a,t,g, or c
  misc_feature (29520): n equals a,t,g, or c
  misc_feature (29521): n equals a,t,g, or c
  misc_feature (29522): n equals a,t,g, or c
  misc_feature (29523): n equals a,t,g, or c
  misc_feature (29524): n equals a,t,g, or c
  misc_feature (29525): n equals a,t,g, or c
  misc_feature (29526): n equals a,t,g, or c
  misc_feature (29527): n equals a,t,g, or c
  misc_feature (29528): n equals a,t,g, or c
  misc_feature (29529): n equals a,t,g, or c
  misc_feature (29530): n equals a,t,g, or c
  misc_feature (29531): n equals a,t,g, or c
  misc_feature (29532): n equals a,t,g, or c
  misc_feature (29533): n equals a,t,g, or c
  misc_feature (29534): n equals a,t,g, or c
  misc_feature (29535): n equals a,t,g, or c
  misc_feature (29536): n equals a,t,g, or c
  misc_feature (29537): n equals a,t,g, or c
  misc_feature (29538): n equals a,t,g, or c
  misc_feature (29539): n equals a,t,g, or c
  misc_feature (29540): n equals a,t,g, or c
  misc_feature (29541): n equals a,t,g, or c
  misc_feature (29542): n equals a,t,g, or c
  misc_feature (29543): n equals a,t,g, or c
  misc_feature (29544): n equals a,t,g, or c
  misc_feature (29545): n equals a,t,g, or c
  misc_feature (29546): n equals a,t,g, or c
  misc_feature (29547): n equals a,t,g, or c
  misc_feature (29548): n equals a,t,g, or c
  misc_feature (29549): n equals a,t,g, or c
  misc_feature (29550): n equals a,t,g, or c
  misc_feature (29551): n equals a,t,g, or c
  misc_feature (29552): n equals a,t,g, or c
  misc_feature (29553): n equals a,t,g, or c
  misc_feature (29554): n equals a,t,g, or c
  misc_feature (29555): n equals a,t,g, or c
  misc_feature (29556): n equals a,t,g, or c
  misc_feature (29557): n equals a,t,g, or c
  misc_feature (29558): n equals a,t,g, or c
  misc_feature (29559): n equals a,t,g, or c
  misc_feature (29560): n equals a,t,g, or c
  misc_feature (29561): n equals a,t,g, or c
  misc_feature (29562): n equals a,t,g, or c
  misc_feature (29563): n equals a,t,g, or c
  misc_feature (29564): n equals a,t,g, or c
  misc_feature (29565): n equals a,t,g, or c
  misc_feature (29566): n equals a,t,g, or c
  misc_feature (29567): n equals a,t,g, or c
  misc_feature (29568): n equals a,t,g, or c
  misc_feature (29569): n equals a,t,g, or c
  misc_feature (29570): n equals a,t,g, or c
  misc_feature (29571): n equals a,t,g, or c
  misc_feature (29572): n equals a,t,g, or c
  misc_feature (29573): n equals a,t,g, or c
  misc_feature (29574): n equals a,t,g, or c
  misc_feature (29575): n equals a,t,g, or c
  misc_feature (29576): n equals a,t,g, or c
  misc_feature (29577): n equals a,t,g, or c
  misc_feature (29578): n equals a,t,g, or c
  misc_feature (29579): n equals a,t,g, or c
  misc_feature (29580): n equals a,t,g, or c
  misc_feature (29581): n equals a,t,g, or c
  misc_feature (29582): n equals a,t,g, or c
  misc_feature (29583): n equals a,t,g, or c
  misc_feature (29584): n equals a,t,g, or c
  misc_feature (29585): n equals a,t,g, or c
  misc_feature (29586): n equals a,t,g, or c
  misc_feature (29587): n equals a,t,g, or c
  misc_feature (29588): n equals a,t,g, or c
  misc_feature (29589): n equals a,t,g, or c
  misc_feature (29590): n equals a,t,g, or c
  misc_feature (29591): n equals a,t,g, or c
  misc_feature (29592): n equals a,t,g, or c
  misc_feature (29593): n equals a,t,g, or c
  misc_feature (29594): n equals a,t,g, or c
  misc_feature (29595): n equals a,t,g, or c
  misc_feature (29596): n equals a,t,g, or c
  misc_feature (29597): n equals a,t,g, or c
  misc_feature (29598): n equals a,t,g, or c
  misc_feature (29599): n equals a,t,g, or c
  misc_feature (29600): n equals a,t,g, or c
  misc_feature (29601): n equals a,t,g, or c
  misc_feature (29602): n equals a,t,g, or c
  misc_feature (29603): n equals a,t,g, or c
  misc_feature (29604): n equals a,t,g, or c
  misc_feature (29605): n equals a,t,g, or c
  misc_feature (29606): n equals a,t,g, or c
  misc_feature (29607): n equals a,t,g, or c
  misc_feature (29608): n equals a,t,g, or c
  misc_feature (29609): n equals a,t,g, or c
  misc_feature (29610): n equals a,t,g, or c
  misc_feature (29611): n equals a,t,g, or c
  misc_feature (29612): n equals a,t,g, or c
  misc_feature (29613): n equals a,t,g, or c
  misc_feature (29614): n equals a,t,g, or c
  misc_feature (29615): n equals a,t,g, or c
  misc_feature (29616): n equals a,t,g, or c
  misc_feature (29617): n equals a,t,g, or c
  misc_feature (29618): n equals a,t,g, or c
  misc_feature (29619): n equals a,t,g, or c
  misc_feature (29620): n equals a,t,g, or c
  misc_feature (29621): n equals a,t,g, or c
  misc_feature (29622): n equals a,t,g, or c
  misc_feature (29623): n equals a,t,g, or c
  misc_feature (29624): n equals a,t,g, or c
  misc_feature (29625): n equals a,t,g, or c
  misc_feature (29626): n equals a,t,g, or c
  misc_feature (29627): n equals a,t,g, or c
  misc_feature (29628): n equals a,t,g, or c
  misc_feature (29629): n equals a,t,g, or c
  misc_feature (29630): n equals a,t,g, or c
  misc_feature (29631): n equals a,t,g, or c
  misc_feature (29632): n equals a,t,g, or c
  misc_feature (29633): n equals a,t,g, or c
  misc_feature (29634): n equals a,t,g, or c
  misc_feature (29635): n equals a,t,g, or c
  misc_feature (29636): n equals a,t,g, or c
  misc_feature (29637): n equals a,t,g, or c
  misc_feature (29638): n equals a,t,g, or c
  misc_feature (29639): n equals a,t,g, or c
  misc_feature (29640): n equals a,t,g, or c
  misc_feature (29641): n equals a,t,g, or c
  misc_feature (29642): n equals a,t,g, or c
  misc_feature (29643): n equals a,t,g, or c
  misc_feature (29644): n equals a,t,g, or c
  misc_feature (29645): n equals a,t,g, or c
  misc_feature (29646): n equals a,t,g, or c
  misc_feature (29647): n equals a,t,g, or c
  misc_feature (29648): n equals a,t,g, or c
  misc_feature (29649): n equals a,t,g, or c
  misc_feature (29650): n equals a,t,g, or c
  misc_feature (29651): n equals a,t,g, or c
  misc_feature (29652): n equals a,t,g, or c
  misc_feature (29653): n equals a,t,g, or c
  misc_feature (29654): n equals a,t,g, or c
  misc_feature (29655): n equals a,t,g, or c
  misc_feature (29656): n equals a,t,g, or c
  misc_feature (29657): n equals a,t,g, or c
  misc_feature (29658): n equals a,t,g, or c
  misc_feature (29659): n equals a,t,g, or c
  misc_feature (29660): n equals a,t,g, or c
  misc_feature (29661): n equals a,t,g, or c
  misc_feature (29662): n equals a,t,g, or c
  misc_feature (29663): n equals a,t,g, or c
  misc_feature (29664): n equals a,t,g, or c
  misc_feature (29665): n equals a,t,g, or c
  misc_feature (29666): n equals a,t,g, or c
  misc_feature (29667): n equals a,t,g, or c
  misc_feature (29668): n equals a,t,g, or c
  misc_feature (29669): n equals a,t,g, or c
  misc_feature (29670): n equals a,t,g, or c
  misc_feature (29671): n equals a,t,g, or c
  misc_feature (29672): n equals a,t,g, or c
  misc_feature (29673): n equals a,t,g, or c
  misc_feature (29674): n equals a,t,g, or c
  misc_feature (29675): n equals a,t,g, or c
  misc_feature (29676): n equals a,t,g, or c
  misc_feature (29677): n equals a,t,g, or c
  misc_feature (29678): n equals a,t,g, or c
  misc_feature (29679): n equals a,t,g, or c
  misc_feature (29680): n equals a,t,g, or c
  misc_feature (29681): n equals a,t,g, or c
  misc_feature (29682): n equals a,t,g, or c
  misc_feature (29683): n equals a,t,g, or c
  misc_feature (29684): n equals a,t,g, or c
  misc_feature (29685): n equals a,t,g, or c
  misc_feature (29686): n equals a,t,g, or c
  misc_feature (29687): n equals a,t,g, or c
  misc_feature (29688): n equals a,t,g, or c
  misc_feature (29689): n equals a,t,g, or c
  misc_feature (29690): n equals a,t,g, or c
  misc_feature (29691): n equals a,t,g, or c
  misc_feature (29692): n equals a,t,g, or c
  misc_feature (29693): n equals a,t,g, or c
  misc_feature (29694): n equals a,t,g, or c
  misc_feature (29695): n equals a,t,g, or c
  misc_feature (29696): n equals a,t,g, or c
  misc_feature (29697): n equals a,t,g, or c
  misc_feature (29698): n equals a,t,g, or c
  misc_feature (29699): n equals a,t,g, or c
  misc_feature (29700): n equals a,t,g, or c
  misc_feature (29701): n equals a,t,g, or c
  misc_feature (29702): n equals a,t,g, or c
  misc_feature (29703): n equals a,t,g, or c
  misc_feature (29704): n equals a,t,g, or c
  misc_feature (29705): n equals a,t,g, or c
  misc_feature (29706): n equals a,t,g, or c
  misc_feature (29707): n equals a,t,g, or c
  misc_feature (29708): n equals a,t,g, or c
  misc_feature (29709): n equals a,t,g, or c
  misc_feature (29710): n equals a,t,g, or c
  misc_feature (29711): n equals a,t,g, or c
  misc_feature (29712): n equals a,t,g, or c
  misc_feature (29713): n equals a,t,g, or c
  misc_feature (29714): n equals a,t,g, or c
  misc_feature (29715): n equals a,t,g, or c
  misc_feature (29716): n equals a,t,g, or c
  misc_feature (29717): n equals a,t,g, or c
  misc_feature (29718): n equals a,t,g, or c
  misc_feature (29719): n equals a,t,g, or c
  misc_feature (29720): n equals a,t,g, or c
  misc_feature (29721): n equals a,t,g, or c
  misc_feature (29722): n equals a,t,g, or c
  misc_feature (29723): n equals a,t,g, or c
  misc_feature (29724): n equals a,t,g, or c
  misc_feature (29725): n equals a,t,g, or c
  misc_feature (29726): n equals a,t,g, or c
  misc_feature (29727): n equals a,t,g, or c
  misc_feature (29728): n equals a,t,g, or c
  misc_feature (29729): n equals a,t,g, or c
  misc_feature (29730): n equals a,t,g, or c
  misc_feature (29731): n equals a,t,g, or c
  misc_feature (29732): n equals a,t,g, or c
  misc_feature (29733): n equals a,t,g, or c
  misc_feature (29734): n equals a,t,g, or c
  misc_feature (29735): n equals a,t,g, or c
  misc_feature (29736): n equals a,t,g, or c
  misc_feature (29737): n equals a,t,g, or c
  misc_feature (29738): n equals a,t,g, or c
  misc_feature (29739): n equals a,t,g, or c
  misc_feature (29740): n equals a,t,g, or c
  misc_feature (29741): n equals a,t,g, or c
  misc_feature (29742): n equals a,t,g, or c
  misc_feature (29743): n equals a,t,g, or c
  misc_feature (29744): n equals a,t,g, or c
  misc_feature (29745): n equals a,t,g, or c
  misc_feature (29746): n equals a,t,g, or c
  misc_feature (29747): n equals a,t,g, or c
  misc_feature (29748): n equals a,t,g, or c
  misc_feature (29749): n equals a,t,g, or c
  misc_feature (29750): n equals a,t,g, or c
  misc_feature (29751): n equals a,t,g, or c
  misc_feature (29752): n equals a,t,g, or c
  misc_feature (29753): n equals a,t,g, or c
  misc_feature (29754): n equals a,t,g, or c
  misc_feature (29755): n equals a,t,g, or c
  misc_feature (29756): n equals a,t,g, or c
  misc_feature (29757): n equals a,t,g, or c
  misc_feature (29758): n equals a,t,g, or c
  misc_feature (29759): n equals a,t,g, or c
  misc_feature (29760): n equals a,t,g, or c
  misc_feature (29761): n equals a,t,g, or c
  misc_feature (29762): n equals a,t,g, or c
  misc_feature (29763): n equals a,t,g, or c
  misc_feature (29764): n equals a,t,g, or c
  misc_feature (29765): n equals a,t,g, or c
  misc_feature (29766): n equals a,t,g, or c
  misc_feature (29767): n equals a,t,g, or c
  misc_feature (29768): n equals a,t,g, or c
  misc_feature (29769): n equals a,t,g, or c
  misc_feature (29770): n equals a,t,g, or c
  misc_feature (29771): n equals a,t,g, or c
  misc_feature (29772): n equals a,t,g, or c
  misc_feature (29773): n equals a,t,g, or c
  misc_feature (29774): n equals a,t,g, or c
  misc_feature (29775): n equals a,t,g, or c
  misc_feature (29776): n equals a,t,g, or c
  misc_feature (29777): n equals a,t,g, or c
  misc_feature (29778): n equals a,t,g, or c
  misc_feature (29779): n equals a,t,g, or c
  misc_feature (29780): n equals a,t,g, or c
  misc_feature (29781): n equals a,t,g, or c
  misc_feature (29782): n equals a,t,g, or c
  misc_feature (29783): n equals a,t,g, or c
  misc_feature (29784): n equals a,t,g, or c
  misc_feature (29785): n equals a,t,g, or c
  misc_feature (29786): n equals a,t,g, or c
  misc_feature (29787): n equals a,t,g, or c
  misc_feature (29788): n equals a,t,g, or c
  misc_feature (29789): n equals a,t,g, or c
  misc_feature (29790): n equals a,t,g, or c
  misc_feature (29791): n equals a,t,g, or c
  misc_feature (29792): n equals a,t,g, or c
  misc_feature (29793): n equals a,t,g, or c
  misc_feature (29794): n equals a,t,g, or c
  misc_feature (29795): n equals a,t,g, or c
  misc_feature (29796): n equals a,t,g, or c
  misc_feature (29797): n equals a,t,g, or c
  misc_feature (29798): n equals a,t,g, or c
  misc_feature (29799): n equals a,t,g, or c
  misc_feature (29800): n equals a,t,g, or c
  misc_feature (29801): n equals a,t,g, or c
  misc_feature (29802): n equals a,t,g, or c
  misc_feature (29803): n equals a,t,g, or c
  misc_feature (29804): n equals a,t,g, or c
  misc_feature (29805): n equals a,t,g, or c
  misc_feature (29806): n equals a,t,g, or c
  misc_feature (29807): n equals a,t,g, or c
  misc_feature (29808): n equals a,t,g, or c
  misc_feature (29809): n equals a,t,g, or c
  misc_feature (29810): n equals a,t,g, or c
  misc_feature (29811): n equals a,t,g, or c
  misc_feature (29812): n equals a,t,g, or c
  misc_feature (29813): n equals a,t,g, or c
  misc_feature (29814): n equals a,t,g, or c
  misc_feature (29815): n equals a,t,g, or c
  misc_feature (29816): n equals a,t,g, or c
  misc_feature (29817): n equals a,t,g, or c
  misc_feature (29818): n equals a,t,g, or c
  misc_feature (29819): n equals a,t,g, or c
  misc_feature (29820): n equals a,t,g, or c
  misc_feature (29821): n equals a,t,g, or c
  misc_feature (29822): n equals a,t,g, or c
  misc_feature (29823): n equals a,t,g, or c
  misc_feature (29824): n equals a,t,g, or c
  misc_feature (29825): n equals a,t,g, or c
  misc_feature (29826): n equals a,t,g, or c
  misc_feature (29827): n equals a,t,g, or c
  misc_feature (29828): n equals a,t,g, or c
  misc_feature (29829): n equals a,t,g, or c
  misc_feature (29830): n equals a,t,g, or c
  misc_feature (29831): n equals a,t,g, or c
  misc_feature (29832): n equals a,t,g, or c
  misc_feature (29833): n equals a,t,g, or c
  misc_feature (29834): n equals a,t,g, or c
  misc_feature (29835): n equals a,t,g, or c
  misc_feature (29836): n equals a,t,g, or c
  misc_feature (29837): n equals a,t,g, or c
  misc_feature (29838): n equals a,t,g, or c
  misc_feature (29839): n equals a,t,g, or c
  misc_feature (29840): n equals a,t,g, or c
  misc_feature (29841): n equals a,t,g, or c
  misc_feature (29842): n equals a,t,g, or c
  misc_feature (29843): n equals a,t,g, or c
  misc_feature (29844): n equals a,t,g, or c
  misc_feature (29845): n equals a,t,g, or c
  misc_feature (29846): n equals a,t,g, or c
  misc_feature (29847): n equals a,t,g, or c
  misc_feature (29848): n equals a,t,g, or c
  misc_feature (29849): n equals a,t,g, or c
  misc_feature (29850): n equals a,t,g, or c
  misc_feature (29851): n equals a,t,g, or c
  misc_feature (29852): n equals a,t,g, or c
  misc_feature (29853): n equals a,t,g, or c
  misc_feature (29854): n equals a,t,g, or c
  misc_feature (29855): n equals a,t,g, or c
  misc_feature (29856): n equals a,t,g, or c
  misc_feature (29857): n equals a,t,g, or c
  misc_feature (29858): n equals a,t,g, or c
  misc_feature (29859): n equals a,t,g, or c
  misc_feature (29860): n equals a,t,g, or c
  misc_feature (29861): n equals a,t,g, or c
  misc_feature (29862): n equals a,t,g, or c
  misc_feature (29863): n equals a,t,g, or c
  misc_feature (29864): n equals a,t,g, or c
  misc_feature (29865): n equals a,t,g, or c
  misc_feature (29866): n equals a,t,g, or c
  misc_feature (29867): n equals a,t,g, or c
  misc_feature (29868): n equals a,t,g, or c
  misc_feature (29869): n equals a,t,g, or c
  misc_feature (29870): n equals a,t,g, or c
  misc_feature (29871): n equals a,t,g, or c
  misc_feature (29872): n equals a,t,g, or c
  misc_feature (29873): n equals a,t,g, or c
  misc_feature (29874): n equals a,t,g, or c
  misc_feature (29875): n equals a,t,g, or c
  misc_feature (29876): n equals a,t,g, or c
  misc_feature (29877): n equals a,t,g, or c
  misc_feature (29878): n equals a,t,g, or c
  misc_feature (29879): n equals a,t,g, or c
  misc_feature (29880): n equals a,t,g, or c
  misc_feature (29881): n equals a,t,g, or c
  misc_feature (29882): n equals a,t,g, or c
  misc_feature (29883): n equals a,t,g, or c
  misc_feature (29884): n equals a,t,g, or c
  misc_feature (29885): n equals a,t,g, or c
  misc_feature (29886): n equals a,t,g, or c
  misc_feature (29887): n equals a,t,g, or c
  misc_feature (29888): n equals a,t,g, or c
  misc_feature (29889): n equals a,t,g, or c
  misc_feature (29890): n equals a,t,g, or c
  misc_feature (29891): n equals a,t,g, or c
  misc_feature (29892): n equals a,t,g, or c
  misc_feature (29893): n equals a,t,g, or c
  misc_feature (29894): n equals a,t,g, or c
  misc_feature (29895): n equals a,t,g, or c
  misc_feature (29896): n equals a,t,g, or c
  misc_feature (29897): n equals a,t,g, or c
  misc_feature (29898): n equals a,t,g, or c
  misc_feature (29899): n equals a,t,g, or c
  misc_feature (29900): n equals a,t,g, or c
  misc_feature (29901): n equals a,t,g, or c
  misc_feature (29902): n equals a,t,g, or c
  misc_feature (29903): n equals a,t,g, or c
  misc_feature (29904): n equals a,t,g, or c
  misc_feature (29905): n equals a,t,g, or c
  misc_feature (29906): n equals a,t,g, or c
  misc_feature (29907): n equals a,t,g, or c
  misc_feature (29908): n equals a,t,g, or c
  misc_feature (29909): n equals a,t,g, or c
  misc_feature (29910): n equals a,t,g, or c
  misc_feature (29911): n equals a,t,g, or c
  misc_feature (29912): n equals a,t,g, or c
  misc_feature (29913): n equals a,t,g, or c
  misc_feature (29914): n equals a,t,g, or c
  misc_feature (29915): n equals a,t,g, or c
  misc_feature (29916): n equals a,t,g, or c
  misc_feature (29917): n equals a,t,g, or c
  misc_feature (29918): n equals a,t,g, or c
  misc_feature (29919): n equals a,t,g, or c
  misc_feature (29920): n equals a,t,g, or c
  misc_feature (29921): n equals a,t,g, or c
  misc_feature (29922): n equals a,t,g, or c
  misc_feature (29923): n equals a,t,g, or c
  misc_feature (29924): n equals a,t,g, or c
  misc_feature (29925): n equals a,t,g, or c
  misc_feature (29926): n equals a,t,g, or c
  misc_feature (29927): n equals a,t,g, or c
  misc_feature (29928): n equals a,t,g, or c
  misc_feature (29929): n equals a,t,g, or c
  misc_feature (29930): n equals a,t,g, or c
  misc_feature (29931): n equals a,t,g, or c
  misc_feature (29932): n equals a,t,g, or c
  misc_feature (29933): n equals a,t,g, or c
  misc_feature (29934): n equals a,t,g, or c
  misc_feature (29935): n equals a,t,g, or c
  misc_feature (29936): n equals a,t,g, or c
  misc_feature (29937): n equals a,t,g, or c
  misc_feature (29938): n equals a,t,g, or c
  misc_feature (29939): n equals a,t,g, or c
  misc_feature (29940): n equals a,t,g, or c
  misc_feature (29941): n equals a,t,g, or c
  misc_feature (29942): n equals a,t,g, or c
  misc_feature (29943): n equals a,t,g, or c
  misc_feature (29944): n equals a,t,g, or c
  misc_feature (29945): n equals a,t,g, or c
  misc_feature (29946): n equals a,t,g, or c
  misc_feature (29947): n equals a,t,g, or c
  misc_feature (29948): n equals a,t,g, or c
  misc_feature (29949): n equals a,t,g, or c
  misc_feature (29950): n equals a,t,g, or c
  misc_feature (29951): n equals a,t,g, or c
  misc_feature (29952): n equals a,t,g, or c
  misc_feature (29953): n equals a,t,g, or c
  misc_feature (29954): n equals a,t,g, or c
  misc_feature (29955): n equals a,t,g, or c
  misc_feature (29956): n equals a,t,g, or c
  misc_feature (29957): n equals a,t,g, or c
  misc_feature (29958): n equals a,t,g, or c
  misc_feature (29959): n equals a,t,g, or c
  misc_feature (29960): n equals a,t,g, or c
  misc_feature (29961): n equals a,t,g, or c
  misc_feature (29962): n equals a,t,g, or c
  misc_feature (29963): n equals a,t,g, or c
  misc_feature (29964): n equals a,t,g, or c
  misc_feature (29965): n equals a,t,g, or c
  misc_feature (29966): n equals a,t,g, or c
  misc_feature (29967): n equals a,t,g, or c
  misc_feature (29968): n equals a,t,g, or c
  misc_feature (29969): n equals a,t,g, or c
  misc_feature (29970): n equals a,t,g, or c
  misc_feature (29971): n equals a,t,g, or c
  misc_feature (29972): n equals a,t,g, or c
  misc_feature (29973): n equals a,t,g, or c
  misc_feature (29974): n equals a,t,g, or c
  misc_feature (29975): n equals a,t,g, or c
  misc_feature (29976): n equals a,t,g, or c
  misc_feature (29977): n equals a,t,g, or c
  misc_feature (29978): n equals a,t,g, or c
  misc_feature (29979): n equals a,t,g, or c
  misc_feature (29980): n equals a,t,g, or c
  misc_feature (29981): n equals a,t,g, or c
  misc_feature (29982): n equals a,t,g, or c
  misc_feature (29983): n equals a,t,g, or c
  misc_feature (29984): n equals a,t,g, or c
  misc_feature (29985): n equals a,t,g, or c
  misc_feature (29986): n equals a,t,g, or c
  misc_feature (29987): n equals a,t,g, or c
  misc_feature (29988): n equals a,t,g, or c
  misc_feature (29989): n equals a,t,g, or c
  misc_feature (29990): n equals a,t,g, or c
  misc_feature (29991): n equals a,t,g, or c
  misc_feature (29992): n equals a,t,g, or c
  misc_feature (29993): n equals a,t,g, or c
  misc_feature (29994): n equals a,t,g, or c
  misc_feature (29995): n equals a,t,g, or c
  misc_feature (29996): n equals a,t,g, or c
  misc_feature (29997): n equals a,t,g, or c
  misc_feature (29998): n equals a,t,g, or c
  misc_feature (29999): n equals a,t,g, or c
  misc_feature (30000): n equals a,t,g, or c
  misc_feature (30001): n equals a,t,g, or c
  misc_feature (30002): n equals a,t,g, or c
  misc_feature (30003): n equals a,t,g, or c
  misc_feature (30004): n equals a,t,g, or c
  misc_feature (30005): n equals a,t,g, or c
  misc_feature (30006): n equals a,t,g, or c
  misc_feature (30007): n equals a,t,g, or c
  misc_feature (30008): n equals a,t,g, or c
  misc_feature (30009): n equals a,t,g, or c
  misc_feature (30010): n equals a,t,g, or c
  misc_feature (30011): n equals a,t,g, or c
  misc_feature (30012): n equals a,t,g, or c
  misc_feature (30013): n equals a,t,g, or c
  misc_feature (30014): n equals a,t,g, or c
  misc_feature (30015): n equals a,t,g, or c
  misc_feature (30016): n equals a,t,g, or c
  misc_feature (30017): n equals a,t,g, or c
  misc_feature (30018): n equals a,t,g, or c
  misc_feature (30019): n equals a,t,g, or c
  misc_feature (30020): n equals a,t,g, or c
  misc_feature (30021): n equals a,t,g, or c
  misc_feature (30022): n equals a,t,g, or c
  misc_feature (30023): n equals a,t,g, or c
  misc_feature (30024): n equals a,t,g, or c
  misc_feature (30025): n equals a,t,g, or c
  misc_feature (30026): n equals a,t,g, or c
  misc_feature (30027): n equals a,t,g, or c
  misc_feature (30028): n equals a,t,g, or c
  misc_feature (30029): n equals a,t,g, or c
  misc_feature (30030): n equals a,t,g, or c
  misc_feature (30031): n equals a,t,g, or c
  misc_feature (30032): n equals a,t,g, or c
  misc_feature (30033): n equals a,t,g, or c
  misc_feature (30034): n equals a,t,g, or c
  misc_feature (30035): n equals a,t,g, or c
  misc_feature (30036): n equals a,t,g, or c
  misc_feature (30037): n equals a,t,g, or c
  misc_feature (30038): n equals a,t,g, or c
  misc_feature (30039): n equals a,t,g, or c
  misc_feature (30040): n equals a,t,g, or c
  misc_feature (30041): n equals a,t,g, or c
  misc_feature (30042): n equals a,t,g, or c
  misc_feature (30043): n equals a,t,g, or c
  misc_feature (30044): n equals a,t,g, or c
  misc_feature (30045): n equals a,t,g, or c
  misc_feature (30046): n equals a,t,g, or c
  misc_feature (30047): n equals a,t,g, or c
  misc_feature (30048): n equals a,t,g, or c
  misc_feature (30049): n equals a,t,g, or c
  misc_feature (30050): n equals a,t,g, or c
  misc_feature (30051): n equals a,t,g, or c
  misc_feature (30052): n equals a,t,g, or c
  misc_feature (30053): n equals a,t,g, or c
  misc_feature (30054): n equals a,t,g, or c
  misc_feature (30055): n equals a,t,g, or c
  misc_feature (30056): n equals a,t,g, or c
  misc_feature (30057): n equals a,t,g, or c
  misc_feature (30058): n equals a,t,g, or c
  misc_feature (30059): n equals a,t,g, or c
  misc_feature (30060): n equals a,t,g, or c
  misc_feature (30061): n equals a,t,g, or c
  misc_feature (30062): n equals a,t,g, or c
  misc_feature (30063): n equals a,t,g, or c
  misc_feature (30064): n equals a,t,g, or c
  misc_feature (30065): n equals a,t,g, or c
  misc_feature (30066): n equals a,t,g, or c
  misc_feature (30067): n equals a,t,g, or c
  misc_feature (30068): n equals a,t,g, or c
  misc_feature (30069): n equals a,t,g, or c
  misc_feature (30070): n equals a,t,g, or c
  misc_feature (30071): n equals a,t,g, or c
  misc_feature (30072): n equals a,t,g, or c
  misc_feature (30073): n equals a,t,g, or c
  misc_feature (30074): n equals a,t,g, or c
  misc_feature (30075): n equals a,t,g, or c
  misc_feature (30076): n equals a,t,g, or c
  misc_feature (30077): n equals a,t,g, or c
  misc_feature (30078): n equals a,t,g, or c
  misc_feature (30079): n equals a,t,g, or c
  misc_feature (30080): n equals a,t,g, or c
  misc_feature (30081): n equals a,t,g, or c
  misc_feature (30082): n equals a,t,g, or c
  misc_feature (30083): n equals a,t,g, or c
  misc_feature (30084): n equals a,t,g, or c
  misc_feature (30085): n equals a,t,g, or c
  misc_feature (30086): n equals a,t,g, or c
  misc_feature (30087): n equals a,t,g, or c
  misc_feature (30088): n equals a,t,g, or c
  misc_feature (30089): n equals a,t,g, or c
  misc_feature (30090): n equals a,t,g, or c
  misc_feature (30091): n equals a,t,g, or c
  misc_feature (30092): n equals a,t,g, or c
  misc_feature (30093): n equals a,t,g, or c
  misc_feature (30094): n equals a,t,g, or c
  misc_feature (30095): n equals a,t,g, or c
  misc_feature (30096): n equals a,t,g, or c
  misc_feature (30097): n equals a,t,g, or c
  misc_feature (30098): n equals a,t,g, or c
  misc_feature (30099): n equals a,t,g, or c
  misc_feature (30100): n equals a,t,g, or c
  misc_feature (30101): n equals a,t,g, or c
  misc_feature (30102): n equals a,t,g, or c
  misc_feature (30103): n equals a,t,g, or c
  misc_feature (30104): n equals a,t,g, or c
  misc_feature (30105): n equals a,t,g, or c
  misc_feature (30106): n equals a,t,g, or c
  misc_feature (30107): n equals a,t,g, or c
  misc_feature (30108): n equals a,t,g, or c
  misc_feature (30109): n equals a,t,g, or c
  misc_feature (30110): n equals a,t,g, or c
  misc_feature (30111): n equals a,t,g, or c
  misc_feature (30112): n equals a,t,g, or c
  misc_feature (30113): n equals a,t,g, or c
  misc_feature (30114): n equals a,t,g, or c
  misc_feature (30115): n equals a,t,g, or c
  misc_feature (30116): n equals a,t,g, or c
  misc_feature (30117): n equals a,t,g, or c
  misc_feature (30118): n equals a,t,g, or c
  misc_feature (30119): n equals a,t,g, or c
  misc_feature (30120): n equals a,t,g, or c
  misc_feature (30121): n equals a,t,g, or c
  misc_feature (30122): n equals a,t,g, or c
  misc_feature (30123): n equals a,t,g, or c
  misc_feature (30124): n equals a,t,g, or c
  misc_feature (30125): n equals a,t,g, or c
  misc_feature (30126): n equals a,t,g, or c
  misc_feature (30127): n equals a,t,g, or c
  misc_feature (30128): n equals a,t,g, or c
  misc_feature (30129): n equals a,t,g, or c
  misc_feature (30130): n equals a,t,g, or c
  misc_feature (30131): n equals a,t,g, or c
  misc_feature (30132): n equals a,t,g, or c
  misc_feature (30133): n equals a,t,g, or c
  misc_feature (30134): n equals a,t,g, or c
  misc_feature (30135): n equals a,t,g, or c
  misc_feature (30136): n equals a,t,g, or c
  misc_feature (30137): n equals a,t,g, or c
  misc_feature (30138): n equals a,t,g, or c
  misc_feature (30139): n equals a,t,g, or c
  misc_feature (30140): n equals a,t,g, or c
  misc_feature (30141): n equals a,t,g, or c
  misc_feature (30142): n equals a,t,g, or c
  misc_feature (30143): n equals a,t,g, or c
  misc_feature (30144): n equals a,t,g, or c
  misc_feature (30145): n equals a,t,g, or c
  misc_feature (30146): n equals a,t,g, or c
  misc_feature (30147): n equals a,t,g, or c
  misc_feature (30148): n equals a,t,g, or c
  misc_feature (30149): n equals a,t,g, or c
  misc_feature (30150): n equals a,t,g, or c
  misc_feature (30151): n equals a,t,g, or c
  misc_feature (30152): n equals a,t,g, or c
  misc_feature (30153): n equals a,t,g, or c
  misc_feature (30154): n equals a,t,g, or c
  misc_feature (30155): n equals a,t,g, or c
  misc_feature (30156): n equals a,t,g, or c
  misc_feature (30157): n equals a,t,g, or c
  misc_feature (30158): n equals a,t,g, or c
  misc_feature (30159): n equals a,t,g, or c
  misc_feature (30160): n equals a,t,g, or c
  misc_feature (30161): n equals a,t,g, or c
  misc_feature (30162): n equals a,t,g, or c
  misc_feature (30163): n equals a,t,g, or c
  misc_feature (30164): n equals a,t,g, or c
  misc_feature (30165): n equals a,t,g, or c
  misc_feature (30166): n equals a,t,g, or c
  misc_feature (30167): n equals a,t,g, or c
  misc_feature (30168): n equals a,t,g, or c
  misc_feature (30169): n equals a,t,g, or c
  misc_feature (30170): n equals a,t,g, or c
  misc_feature (30171): n equals a,t,g, or c
  misc_feature (30172): n equals a,t,g, or c
  misc_feature (30173): n equals a,t,g, or c
  misc_feature (30174): n equals a,t,g, or c
  misc_feature (30175): n equals a,t,g, or c
  misc_feature (30176): n equals a,t,g, or c
  misc_feature (30177): n equals a,t,g, or c
  misc_feature (30178): n equals a,t,g, or c
  misc_feature (30179): n equals a,t,g, or c
  misc_feature (30180): n equals a,t,g, or c
  misc_feature (30181): n equals a,t,g, or c
  misc_feature (30182): n equals a,t,g, or c
  misc_feature (30183): n equals a,t,g, or c
  misc_feature (30184): n equals a,t,g, or c
  misc_feature (30185): n equals a,t,g, or c
  misc_feature (30186): n equals a,t,g, or c
  misc_feature (30187): n equals a,t,g, or c
  misc_feature (30188): n equals a,t,g, or c
  misc_feature (30189): n equals a,t,g, or c
  misc_feature (30190): n equals a,t,g, or c
  misc_feature (30191): n equals a,t,g, or c
  misc_feature (30192): n equals a,t,g, or c
  misc_feature (30193): n equals a,t,g, or c
  misc_feature (30194): n equals a,t,g, or c
  misc_feature (30195): n equals a,t,g, or c
  misc_feature (30196): n equals a,t,g, or c
  misc_feature (30197): n equals a,t,g, or c
  misc_feature (30198): n equals a,t,g, or c
  misc_feature (30199): n equals a,t,g, or c
  misc_feature (30200): n equals a,t,g, or c
  misc_feature (30201): n equals a,t,g, or c
  misc_feature (30202): n equals a,t,g, or c
  misc_feature (30203): n equals a,t,g, or c
  misc_feature (30204): n equals a,t,g, or c
  misc_feature (30205): n equals a,t,g, or c
  misc_feature (30206): n equals a,t,g, or c
  misc_feature (30207): n equals a,t,g, or c
  misc_feature (30208): n equals a,t,g, or c
  misc_feature (30209): n equals a,t,g, or c
  misc_feature (30210): n equals a,t,g, or c
  misc_feature (30211): n equals a,t,g, or c
  misc_feature (30212): n equals a,t,g, or c
  misc_feature (30213): n equals a,t,g, or c
  misc_feature (30214): n equals a,t,g, or c
  misc_feature (30215): n equals a,t,g, or c
  misc_feature (30216): n equals a,t,g, or c
  misc_feature (30217): n equals a,t,g, or c
  misc_feature (30218): n equals a,t,g, or c
  misc_feature (30219): n equals a,t,g, or c
  misc_feature (30220): n equals a,t,g, or c
  misc_feature (30221): n equals a,t,g, or c
  misc_feature (30222): n equals a,t,g, or c
  misc_feature (30223): n equals a,t,g, or c
  misc_feature (30224): n equals a,t,g, or c
  misc_feature (30225): n equals a,t,g, or c
  misc_feature (30226): n equals a,t,g, or c
  misc_feature (30227): n equals a,t,g, or c
  misc_feature (30228): n equals a,t,g, or c
  misc_feature (30229): n equals a,t,g, or c
  misc_feature (30230): n equals a,t,g, or c
  misc_feature (30231): n equals a,t,g, or c
  misc_feature (30232): n equals a,t,g, or c
  misc_feature (30233): n equals a,t,g, or c
  misc_feature (30234): n equals a,t,g, or c
  misc_feature (30235): n equals a,t,g, or c
  misc_feature (30236): n equals a,t,g, or c
  misc_feature (30237): n equals a,t,g, or c
  misc_feature (30238): n equals a,t,g, or c
  misc_feature (30239): n equals a,t,g, or c
  misc_feature (30240): n equals a,t,g, or c
  misc_feature (30241): n equals a,t,g, or c
  misc_feature (30242): n equals a,t,g, or c
  misc_feature (30243): n equals a,t,g, or c
  misc_feature (30244): n equals a,t,g, or c
  misc_feature (30245): n equals a,t,g, or c
  misc_feature (30246): n equals a,t,g, or c
  misc_feature (30247): n equals a,t,g, or c
  misc_feature (30248): n equals a,t,g, or c
  misc_feature (30249): n equals a,t,g, or c
  misc_feature (30250): n equals a,t,g, or c
  misc_feature (30251): n equals a,t,g, or c
  misc_feature (30252): n equals a,t,g, or c
  misc_feature (30253): n equals a,t,g, or c
  misc_feature (30254): n equals a,t,g, or c
  misc_feature (30255): n equals a,t,g, or c
  misc_feature (30256): n equals a,t,g, or c
  misc_feature (30257): n equals a,t,g, or c
  misc_feature (30258): n equals a,t,g, or c
  misc_feature (30259): n equals a,t,g, or c
  misc_feature (30260): n equals a,t,g, or c
  misc_feature (30261): n equals a,t,g, or c
  misc_feature (30262): n equals a,t,g, or c
  misc_feature (30263): n equals a,t,g, or c
  misc_feature (30264): n equals a,t,g, or c
  misc_feature (30265): n equals a,t,g, or c
  misc_feature (30266): n equals a,t,g, or c
  misc_feature (30267): n equals a,t,g, or c
  misc_feature (30268): n equals a,t,g, or c
  misc_feature (30269): n equals a,t,g, or c
  misc_feature (30270): n equals a,t,g, or c
  misc_feature (30271): n equals a,t,g, or c
  misc_feature (30272): n equals a,t,g, or c
  misc_feature (30273): n equals a,t,g, or c
  misc_feature (30274): n equals a,t,g, or c
  misc_feature (30275): n equals a,t,g, or c
  misc_feature (30276): n equals a,t,g, or c
  misc_feature (30277): n equals a,t,g, or c
  misc_feature (30278): n equals a,t,g, or c
  misc_feature (30279): n equals a,t,g, or c
  misc_feature (30280): n equals a,t,g, or c
  misc_feature (30281): n equals a,t,g, or c
  misc_feature (30282): n equals a,t,g, or c
  misc_feature (30283): n equals a,t,g, or c
  misc_feature (30284): n equals a,t,g, or c
  misc_feature (30285): n equals a,t,g, or c
  misc_feature (30286): n equals a,t,g, or c
  misc_feature (30287): n equals a,t,g, or c
  misc_feature (30288): n equals a,t,g, or c
  misc_feature (30289): n equals a,t,g, or c
  misc_feature (30290): n equals a,t,g, or c
  misc_feature (30291): n equals a,t,g, or c
  misc_feature (30292): n equals a,t,g, or c
  misc_feature (30293): n equals a,t,g, or c
  misc_feature (30294): n equals a,t,g, or c
  misc_feature (30295): n equals a,t,g, or c
  misc_feature (30296): n equals a,t,g, or c
  misc_feature (30297): n equals a,t,g, or c
  misc_feature (30298): n equals a,t,g, or c
  misc_feature (30299): n equals a,t,g, or c
  misc_feature (30300): n equals a,t,g, or c
  misc_feature (30301): n equals a,t,g, or c
  misc_feature (30302): n equals a,t,g, or c
  misc_feature (30303): n equals a,t,g, or c
  misc_feature (30304): n equals a,t,g, or c
  misc_feature (30305): n equals a,t,g, or c
  misc_feature (30306): n equals a,t,g, or c
  misc_feature (30307): n equals a,t,g, or c
  misc_feature (30308): n equals a,t,g, or c
  misc_feature (30309): n equals a,t,g, or c
  misc_feature (30310): n equals a,t,g, or c
  misc_feature (30311): n equals a,t,g, or c
  misc_feature (30312): n equals a,t,g, or c
  misc_feature (30313): n equals a,t,g, or c
  misc_feature (30314): n equals a,t,g, or c
  misc_feature (30315): n equals a,t,g, or c
  misc_feature (30316): n equals a,t,g, or c
  misc_feature (30317): n equals a,t,g, or c
  misc_feature (30318): n equals a,t,g, or c
  misc_feature (30319): n equals a,t,g, or c
  misc_feature (30320): n equals a,t,g, or c
  misc_feature (30321): n equals a,t,g, or c
  misc_feature (30322): n equals a,t,g, or c
  misc_feature (30323): n equals a,t,g, or c
  misc_feature (30324): n equals a,t,g, or c
  misc_feature (30325): n equals a,t,g, or c
  misc_feature (30326): n equals a,t,g, or c
  misc_feature (30327): n equals a,t,g, or c
  misc_feature (30328): n equals a,t,g, or c
  misc_feature (30329): n equals a,t,g, or c
  misc_feature (30330): n equals a,t,g, or c
  misc_feature (30331): n equals a,t,g, or c
  misc_feature (30332): n equals a,t,g, or c
  misc_feature (30333): n equals a,t,g, or c
  misc_feature (30334): n equals a,t,g, or c
  misc_feature (30335): n equals a,t,g, or c
  misc_feature (30336): n equals a,t,g, or c
  misc_feature (30337): n equals a,t,g, or c
  misc_feature (30338): n equals a,t,g, or c
  misc_feature (30339): n equals a,t,g, or c
  misc_feature (30340): n equals a,t,g, or c
  misc_feature (30341): n equals a,t,g, or c
  misc_feature (30342): n equals a,t,g, or c
  misc_feature (30343): n equals a,t,g, or c
  misc_feature (30344): n equals a,t,g, or c
  misc_feature (30345): n equals a,t,g, or c
  misc_feature (30346): n equals a,t,g, or c
  misc_feature (30347): n equals a,t,g, or c
  misc_feature (30348): n equals a,t,g, or c
  misc_feature (30349): n equals a,t,g, or c
  misc_feature (30350): n equals a,t,g, or c
  misc_feature (30351): n equals a,t,g, or c
  misc_feature (30352): n equals a,t,g, or c
  misc_feature (30353): n equals a,t,g, or c
  misc_feature (30354): n equals a,t,g, or c
  misc_feature (30355): n equals a,t,g, or c
  misc_feature (30356): n equals a,t,g, or c
  misc_feature (30357): n equals a,t,g, or c
  misc_feature (30358): n equals a,t,g, or c
  misc_feature (30359): n equals a,t,g, or c
  misc_feature (30360): n equals a,t,g, or c
  misc_feature (30361): n equals a,t,g, or c
  misc_feature (30362): n equals a,t,g, or c
  misc_feature (30363): n equals a,t,g, or c
  misc_feature (30364): n equals a,t,g, or c
  misc_feature (30365): n equals a,t,g, or c
  misc_feature (30366): n equals a,t,g, or c
  misc_feature (30367): n equals a,t,g, or c
  misc_feature (30368): n equals a,t,g, or c
  misc_feature (30369): n equals a,t,g, or c
  misc_feature (30370): n equals a,t,g, or c
  misc_feature (30371): n equals a,t,g, or c
  misc_feature (30372): n equals a,t,g, or c
  misc_feature (30373): n equals a,t,g, or c
  misc_feature (30374): n equals a,t,g, or c
  misc_feature (30375): n equals a,t,g, or c
  misc_feature (30376): n equals a,t,g, or c
  misc_feature (30377): n equals a,t,g, or c
  misc_feature (30378): n equals a,t,g, or c
  misc_feature (30379): n equals a,t,g, or c
  misc_feature (30380): n equals a,t,g, or c
  misc_feature (30381): n equals a,t,g, or c
  misc_feature (30382): n equals a,t,g, or c
  misc_feature (30383): n equals a,t,g, or c
  misc_feature (30384): n equals a,t,g, or c
  misc_feature (30385): n equals a,t,g, or c
  misc_feature (30386): n equals a,t,g, or c
  misc_feature (30387): n equals a,t,g, or c
  misc_feature (30388): n equals a,t,g, or c
  misc_feature (30389): n equals a,t,g, or c
  misc_feature (30390): n equals a,t,g, or c
  misc_feature (30391): n equals a,t,g, or c
  misc_feature (30392): n equals a,t,g, or c
  misc_feature (30393): n equals a,t,g, or c
  misc_feature (30394): n equals a,t,g, or c
  misc_feature (30395): n equals a,t,g, or c
  misc_feature (30396): n equals a,t,g, or c
  misc_feature (30397): n equals a,t,g, or c
  misc_feature (30398): n equals a,t,g, or c
  misc_feature (30399): n equals a,t,g, or c
  misc_feature (30400): n equals a,t,g, or c
  misc_feature (30401): n equals a,t,g, or c
  misc_feature (30402): n equals a,t,g, or c
  misc_feature (30403): n equals a,t,g, or c
  misc_feature (30404): n equals a,t,g, or c
  misc_feature (30405): n equals a,t,g, or c
  misc_feature (30406): n equals a,t,g, or c
  misc_feature (30407): n equals a,t,g, or c
  misc_feature (30408): n equals a,t,g, or c
  misc_feature (30409): n equals a,t,g, or c
  misc_feature (30410): n equals a,t,g, or c
  misc_feature (30411): n equals a,t,g, or c
  misc_feature (30412): n equals a,t,g, or c
  misc_feature (30413): n equals a,t,g, or c
  misc_feature (30414): n equals a,t,g, or c
  misc_feature (30415): n equals a,t,g, or c
  misc_feature (30416): n equals a,t,g, or c
  misc_feature (30417): n equals a,t,g, or c
  misc_feature (30418): n equals a,t,g, or c
  misc_feature (30419): n equals a,t,g, or c
  misc_feature (30420): n equals a,t,g, or c
  misc_feature (30421): n equals a,t,g, or c
  misc_feature (30422): n equals a,t,g, or c
  misc_feature (30423): n equals a,t,g, or c
  misc_feature (30424): n equals a,t,g, or c
  misc_feature (30425): n equals a,t,g, or c
  misc_feature (30426): n equals a,t,g, or c
  misc_feature (30427): n equals a,t,g, or c
  misc_feature (30428): n equals a,t,g, or c
  misc_feature (30429): n equals a,t,g, or c
  misc_feature (30430): n equals a,t,g, or c
  misc_feature (30431): n equals a,t,g, or c
  misc_feature (30432): n equals a,t,g, or c
  misc_feature (30433): n equals a,t,g, or c
  misc_feature (30434): n equals a,t,g, or c
  misc_feature (30435): n equals a,t,g, or c
  misc_feature (30436): n equals a,t,g, or c
  misc_feature (30437): n equals a,t,g, or c
  misc_feature (30438): n equals a,t,g, or c
  misc_feature (30439): n equals a,t,g, or c
  misc_feature (30440): n equals a,t,g, or c
  misc_feature (30441): n equals a,t,g, or c
  misc_feature (30442): n equals a,t,g, or c
  misc_feature (30443): n equals a,t,g, or c
  misc_feature (30444): n equals a,t,g, or c
  misc_feature (30445): n equals a,t,g, or c
  misc_feature (30446): n equals a,t,g, or c
  misc_feature (30447): n equals a,t,g, or c
  misc_feature (30448): n equals a,t,g, or c
  misc_feature (30449): n equals a,t,g, or c
  misc_feature (30450): n equals a,t,g, or c
  misc_feature (30451): n equals a,t,g, or c
  misc_feature (30452): n equals a,t,g, or c
  misc_feature (30453): n equals a,t,g, or c
  misc_feature (30454): n equals a,t,g, or c
  misc_feature (30455): n equals a,t,g, or c
  misc_feature (30456): n equals a,t,g, or c
  misc_feature (30457): n equals a,t,g, or c
  misc_feature (30458): n equals a,t,g, or c
  misc_feature (30459): n equals a,t,g, or c
  misc_feature (30460): n equals a,t,g, or c
  misc_feature (30461): n equals a,t,g, or c
  misc_feature (30462): n equals a,t,g, or c
  misc_feature (30463): n equals a,t,g, or c
  misc_feature (30464): n equals a,t,g, or c
  misc_feature (30465): n equals a,t,g, or c
  misc_feature (30466): n equals a,t,g, or c
  misc_feature (30467): n equals a,t,g, or c
  misc_feature (30468): n equals a,t,g, or c
  misc_feature (30469): n equals a,t,g, or c
  misc_feature (30470): n equals a,t,g, or c
  misc_feature (30471): n equals a,t,g, or c
  misc_feature (30472): n equals a,t,g, or c
  misc_feature (30473): n equals a,t,g, or c
  misc_feature (30474): n equals a,t,g, or c
  misc_feature (30475): n equals a,t,g, or c
  misc_feature (30476): n equals a,t,g, or c
  misc_feature (30477): n equals a,t,g, or c
  misc_feature (30478): n equals a,t,g, or c
  misc_feature (30479): n equals a,t,g, or c
  misc_feature (30480): n equals a,t,g, or c
  misc_feature (30481): n equals a,t,g, or c
  misc_feature (30482): n equals a,t,g, or c
  misc_feature (30483): n equals a,t,g, or c
  misc_feature (30484): n equals a,t,g, or c
  misc_feature (30485): n equals a,t,g, or c
  misc_feature (30486): n equals a,t,g, or c
  misc_feature (30487): n equals a,t,g, or c
  misc_feature (30488): n equals a,t,g, or c
  misc_feature (30489): n equals a,t,g, or c
  misc_feature (30490): n equals a,t,g, or c
  misc_feature (30491): n equals a,t,g, or c
  misc_feature (30492): n equals a,t,g, or c
  misc_feature (30493): n equals a,t,g, or c
  misc_feature (30494): n equals a,t,g, or c
  misc_feature (30495): n equals a,t,g, or c
  misc_feature (30496): n equals a,t,g, or c
  misc_feature (30497): n equals a,t,g, or c
  misc_feature (30498): n equals a,t,g, or c
  misc_feature (30499): n equals a,t,g, or c
  misc_feature (30500): n equals a,t,g, or c
  misc_feature (30501): n equals a,t,g, or c
  misc_feature (30502): n equals a,t,g, or c
  misc_feature (30503): n equals a,t,g, or c
  misc_feature (30504): n equals a,t,g, or c
  misc_feature (30505): n equals a,t,g, or c
  misc_feature (30506): n equals a,t,g, or c
  misc_feature (30507): n equals a,t,g, or c
  misc_feature (30508): n equals a,t,g, or c
  misc_feature (30509): n equals a,t,g, or c
  misc_feature (30510): n equals a,t,g, or c
  misc_feature (30511): n equals a,t,g, or c
  misc_feature (30512): n equals a,t,g, or c
  misc_feature (30513): n equals a,t,g, or c
  misc_feature (30514): n equals a,t,g, or c
  misc_feature (30515): n equals a,t,g, or c
  misc_feature (30516): n equals a,t,g, or c
  misc_feature (30517): n equals a,t,g, or c
  misc_feature (30518): n equals a,t,g, or c
  misc_feature (30519): n equals a,t,g, or c
  misc_feature (30520): n equals a,t,g, or c
  misc_feature (30521): n equals a,t,g, or c
  misc_feature (30522): n equals a,t,g, or c
  misc_feature (30523): n equals a,t,g, or c
  misc_feature (30524): n equals a,t,g, or c
  misc_feature (30525): n equals a,t,g, or c
  misc_feature (30526): n equals a,t,g, or c
  misc_feature (30527): n equals a,t,g, or c
  misc_feature (30528): n equals a,t,g, or c
  misc_feature (30529): n equals a,t,g, or c
  misc_feature (30530): n equals a,t,g, or c
  misc_feature (30531): n equals a,t,g, or c
  misc_feature (30532): n equals a,t,g, or c
  misc_feature (30533): n equals a,t,g, or c
  misc_feature (30534): n equals a,t,g, or c
  misc_feature (30535): n equals a,t,g, or c
  misc_feature (30536): n equals a,t,g, or c
  misc_feature (30537): n equals a,t,g, or c
  misc_feature (30538): n equals a,t,g, or c
  misc_feature (30539): n equals a,t,g, or c
  misc_feature (30540): n equals a,t,g, or c
  misc_feature (30541): n equals a,t,g, or c
  misc_feature (30542): n equals a,t,g, or c
  misc_feature (30543): n equals a,t,g, or c
  misc_feature (30544): n equals a,t,g, or c
  misc_feature (30545): n equals a,t,g, or c
  misc_feature (30546): n equals a,t,g, or c
  misc_feature (30547): n equals a,t,g, or c
  misc_feature (30548): n equals a,t,g, or c
  misc_feature (30549): n equals a,t,g, or c
  misc_feature (30550): n equals a,t,g, or c
  misc_feature (30551): n equals a,t,g, or c
  misc_feature (30552): n equals a,t,g, or c
  misc_feature (30553): n equals a,t,g, or c
  misc_feature (30554): n equals a,t,g, or c
  misc_feature (30555): n equals a,t,g, or c
  misc_feature (30556): n equals a,t,g, or c
  misc_feature (30557): n equals a,t,g, or c
  misc_feature (30558): n equals a,t,g, or c
  misc_feature (30559): n equals a,t,g, or c
  misc_feature (30560): n equals a,t,g, or c
  misc_feature (30561): n equals a,t,g, or c
  misc_feature (30562): n equals a,t,g, or c
  misc_feature (30563): n equals a,t,g, or c
  misc_feature (30564): n equals a,t,g, or c
  misc_feature (30565): n equals a,t,g, or c
  misc_feature (30566): n equals a,t,g, or c
  misc_feature (30567): n equals a,t,g, or c
  misc_feature (30568): n equals a,t,g, or c
  misc_feature (30569): n equals a,t,g, or c
  misc_feature (30570): n equals a,t,g, or c
  misc_feature (30571): n equals a,t,g, or c
  misc_feature (30572): n equals a,t,g, or c
  misc_feature (30573): n equals a,t,g, or c
  misc_feature (30574): n equals a,t,g, or c
  misc_feature (30575): n equals a,t,g, or c
  misc_feature (30576): n equals a,t,g, or c
  misc_feature (30577): n equals a,t,g, or c
  misc_feature (30578): n equals a,t,g, or c
  misc_feature (30579): n equals a,t,g, or c
  misc_feature (30580): n equals a,t,g, or c
  misc_feature (30581): n equals a,t,g, or c
  misc_feature (30582): n equals a,t,g, or c
  misc_feature (30583): n equals a,t,g, or c
  misc_feature (30584): n equals a,t,g, or c
  misc_feature (30585): n equals a,t,g, or c
  misc_feature (30586): n equals a,t,g, or c
  misc_feature (30587): n equals a,t,g, or c
  misc_feature (30588): n equals a,t,g, or c
  misc_feature (30589): n equals a,t,g, or c
  misc_feature (30590): n equals a,t,g, or c
  misc_feature (30591): n equals a,t,g, or c
  misc_feature (30592): n equals a,t,g, or c
  misc_feature (30593): n equals a,t,g, or c
  misc_feature (30594): n equals a,t,g, or c
  misc_feature (30595): n equals a,t,g, or c
  misc_feature (30596): n equals a,t,g, or c
  misc_feature (30597): n equals a,t,g, or c
  misc_feature (30598): n equals a,t,g, or c
  misc_feature (30599): n equals a,t,g, or c
  misc_feature (30600): n equals a,t,g, or c
  misc_feature (30601): n equals a,t,g, or c
  misc_feature (30602): n equals a,t,g, or c
  misc_feature (30603): n equals a,t,g, or c
  misc_feature (30604): n equals a,t,g, or c
  misc_feature (30605): n equals a,t,g, or c
  misc_feature (30606): n equals a,t,g, or c
  misc_feature (30607): n equals a,t,g, or c
  misc_feature (30608): n equals a,t,g, or c
  misc_feature (30609): n equals a,t,g, or c
  misc_feature (30610): n equals a,t,g, or c
  misc_feature (30611): n equals a,t,g, or c
  misc_feature (30612): n equals a,t,g, or c
  misc_feature (30613): n equals a,t,g, or c
  misc_feature (30614): n equals a,t,g, or c
  misc_feature (30615): n equals a,t,g, or c
  misc_feature (30616): n equals a,t,g, or c
  misc_feature (30617): n equals a,t,g, or c
  misc_feature (30618): n equals a,t,g, or c
  misc_feature (30619): n equals a,t,g, or c
  misc_feature (30620): n equals a,t,g, or c
  misc_feature (30621): n equals a,t,g, or c
  misc_feature (30622): n equals a,t,g, or c
  misc_feature (30623): n equals a,t,g, or c
  misc_feature (30624): n equals a,t,g, or c
  misc_feature (30625): n equals a,t,g, or c
  misc_feature (30626): n equals a,t,g, or c
  misc_feature (30627): n equals a,t,g, or c
  misc_feature (30628): n equals a,t,g, or c
  misc_feature (30629): n equals a,t,g, or c
  misc_feature (30630): n equals a,t,g, or c
  misc_feature (30631): n equals a,t,g, or c
  misc_feature (30632): n equals a,t,g, or c
  misc_feature (30633): n equals a,t,g, or c
  misc_feature (30634): n equals a,t,g, or c
  misc_feature (30635): n equals a,t,g, or c
  misc_feature (30636): n equals a,t,g, or c
  misc_feature (30637): n equals a,t,g, or c
  misc_feature (30638): n equals a,t,g, or c
  misc_feature (30639): n equals a,t,g, or c
  misc_feature (30640): n equals a,t,g, or c
  misc_feature (30641): n equals a,t,g, or c
  misc_feature (30642): n equals a,t,g, or c
  misc_feature (30643): n equals a,t,g, or c
  misc_feature (30644): n equals a,t,g, or c
  misc_feature (30645): n equals a,t,g, or c
  misc_feature (30646): n equals a,t,g, or c
  misc_feature (30647): n equals a,t,g, or c
  misc_feature (30648): n equals a,t,g, or c
  misc_feature (30649): n equals a,t,g, or c
  misc_feature (30650): n equals a,t,g, or c
  misc_feature (30651): n equals a,t,g, or c
  misc_feature (30652): n equals a,t,g, or c
  misc_feature (30653): n equals a,t,g, or c
  misc_feature (30654): n equals a,t,g, or c
  misc_feature (30655): n equals a,t,g, or c
  misc_feature (30656): n equals a,t,g, or c
  misc_feature (30657): n equals a,t,g, or c
  misc_feature (30658): n equals a,t,g, or c
  misc_feature (30659): n equals a,t,g, or c
  misc_feature (30660): n equals a,t,g, or c
  misc_feature (30661): n equals a,t,g, or c
  misc_feature (30662): n equals a,t,g, or c
  misc_feature (30663): n equals a,t,g, or c
  misc_feature (30664): n equals a,t,g, or c
  misc_feature (30665): n equals a,t,g, or c
  misc_feature (30666): n equals a,t,g, or c
  misc_feature (30667): n equals a,t,g, or c
  misc_feature (30668): n equals a,t,g, or c
  misc_feature (30669): n equals a,t,g, or c
  misc_feature (30670): n equals a,t,g, or c
  misc_feature (30671): n equals a,t,g, or c
  misc_feature (30672): n equals a,t,g, or c
  misc_feature (30673): n equals a,t,g, or c
  misc_feature (30674): n equals a,t,g, or c
  misc_feature (30675): n equals a,t,g, or c
  misc_feature (30676): n equals a,t,g, or c
  misc_feature (30677): n equals a,t,g, or c
  misc_feature (30678): n equals a,t,g, or c
  misc_feature (30679): n equals a,t,g, or c
  misc_feature (30680): n equals a,t,g, or c
  misc_feature (30681): n equals a,t,g, or c
  misc_feature (30682): n equals a,t,g, or c
  misc_feature (30683): n equals a,t,g, or c
  misc_feature (30684): n equals a,t,g, or c
  misc_feature (30685): n equals a,t,g, or c
  misc_feature (30686): n equals a,t,g, or c
  misc_feature (30687): n equals a,t,g, or c
  misc_feature (30688): n equals a,t,g, or c
  misc_feature (30689): n equals a,t,g, or c
  misc_feature (30690): n equals a,t,g, or c
  misc_feature (30691): n equals a,t,g, or c
  misc_feature (30692): n equals a,t,g, or c
  misc_feature (30693): n equals a,t,g, or c
  misc_feature (30694): n equals a,t,g, or c
  misc_feature (30695): n equals a,t,g, or c
  misc_feature (30696): n equals a,t,g, or c
  misc_feature (30697): n equals a,t,g, or c
  misc_feature (30698): n equals a,t,g, or c
  misc_feature (30699): n equals a,t,g, or c
  misc_feature (30700): n equals a,t,g, or c
  misc_feature (30701): n equals a,t,g, or c
  misc_feature (30702): n equals a,t,g, or c
  misc_feature (30703): n equals a,t,g, or c
  misc_feature (30704): n equals a,t,g, or c
  misc_feature (30705): n equals a,t,g, or c
  misc_feature (30706): n equals a,t,g, or c
  misc_feature (30707): n equals a,t,g, or c
  misc_feature (30708): n equals a,t,g, or c
  misc_feature (30709): n equals a,t,g, or c
  misc_feature (30710): n equals a,t,g, or c
  misc_feature (30711): n equals a,t,g, or c
  misc_feature (30712): n equals a,t,g, or c
  misc_feature (30713): n equals a,t,g, or c
  misc_feature (30714): n equals a,t,g, or c
  misc_feature (30715): n equals a,t,g, or c
  misc_feature (30716): n equals a,t,g, or c
  misc_feature (30717): n equals a,t,g, or c
  misc_feature (30718): n equals a,t,g, or c
  misc_feature (30719): n equals a,t,g, or c
  misc_feature (30720): n equals a,t,g, or c
  misc_feature (30721): n equals a,t,g, or c
  misc_feature (30722): n equals a,t,g, or c
  misc_feature (30723): n equals a,t,g, or c
  misc_feature (30724): n equals a,t,g, or c
  misc_feature (30725): n equals a,t,g, or c
  misc_feature (30726): n equals a,t,g, or c
  misc_feature (30727): n equals a,t,g, or c
  misc_feature (30728): n equals a,t,g, or c
  misc_feature (30729): n equals a,t,g, or c
  misc_feature (30730): n equals a,t,g, or c
  misc_feature (30731): n equals a,t,g, or c
  misc_feature (30732): n equals a,t,g, or c
  misc_feature (30733): n equals a,t,g, or c
  misc_feature (30734): n equals a,t,g, or c
  misc_feature (30735): n equals a,t,g, or c
  misc_feature (30736): n equals a,t,g, or c
  misc_feature (30737): n equals a,t,g, or c
  misc_feature (30738): n equals a,t,g, or c
  misc_feature (30739): n equals a,t,g, or c
  misc_feature (30740): n equals a,t,g, or c
  misc_feature (30741): n equals a,t,g, or c
  misc_feature (30742): n equals a,t,g, or c
  misc_feature (30743): n equals a,t,g, or c
  misc_feature (30744): n equals a,t,g, or c
  misc_feature (30745): n equals a,t,g, or c
  misc_feature (30746): n equals a,t,g, or c
  misc_feature (30747): n equals a,t,g, or c
  misc_feature (30748): n equals a,t,g, or c
  misc_feature (30749): n equals a,t,g, or c
  misc_feature (30750): n equals a,t,g, or c
  misc_feature (30751): n equals a,t,g, or c
  misc_feature (30752): n equals a,t,g, or c
  misc_feature (30753): n equals a,t,g, or c
  misc_feature (30754): n equals a,t,g, or c
  misc_feature (30755): n equals a,t,g, or c
  misc_feature (30756): n equals a,t,g, or c
  misc_feature (30757): n equals a,t,g, or c
  misc_feature (30758): n equals a,t,g, or c
  misc_feature (30759): n equals a,t,g, or c
  misc_feature (30760): n equals a,t,g, or c
  misc_feature (30761): n equals a,t,g, or c
  misc_feature (30762): n equals a,t,g, or c
  misc_feature (30763): n equals a,t,g, or c
  misc_feature (30764): n equals a,t,g, or c
  misc_feature (30765): n equals a,t,g, or c
  misc_feature (30766): n equals a,t,g, or c
  misc_feature (30767): n equals a,t,g, or c
  misc_feature (30768): n equals a,t,g, or c
  misc_feature (30769): n equals a,t,g, or c
  misc_feature (30770): n equals a,t,g, or c
  misc_feature (30771): n equals a,t,g, or c
  misc_feature (30772): n equals a,t,g, or c
  misc_feature (30773): n equals a,t,g, or c
  misc_feature (30774): n equals a,t,g, or c
  misc_feature (30775): n equals a,t,g, or c
  misc_feature (30776): n equals a,t,g, or c
  misc_feature (30777): n equals a,t,g, or c
  misc_feature (30778): n equals a,t,g, or c
  misc_feature (30779): n equals a,t,g, or c
  misc_feature (30780): n equals a,t,g, or c
  misc_feature (30781): n equals a,t,g, or c
  misc_feature (30782): n equals a,t,g, or c
  misc_feature (30783): n equals a,t,g, or c
  misc_feature (30784): n equals a,t,g, or c
  misc_feature (30785): n equals a,t,g, or c
  misc_feature (30786): n equals a,t,g, or c
  misc_feature (30787): n equals a,t,g, or c
  misc_feature (30788): n equals a,t,g, or c
  misc_feature (30789): n equals a,t,g, or c
  misc_feature (30790): n equals a,t,g, or c
  misc_feature (30791): n equals a,t,g, or c
  misc_feature (30792): n equals a,t,g, or c
  misc_feature (30793): n equals a,t,g, or c
  misc_feature (30794): n equals a,t,g, or c
  misc_feature (30795): n equals a,t,g, or c
  misc_feature (30796): n equals a,t,g, or c
  misc_feature (30797): n equals a,t,g, or c
  misc_feature (30798): n equals a,t,g, or c
  misc_feature (30799): n equals a,t,g, or c
  misc_feature (30800): n equals a,t,g, or c
  misc_feature (30801): n equals a,t,g, or c
  misc_feature (30802): n equals a,t,g, or c
  misc_feature (30803): n equals a,t,g, or c
  misc_feature (30804): n equals a,t,g, or c
  misc_feature (30805): n equals a,t,g, or c
  misc_feature (30806): n equals a,t,g, or c
  misc_feature (30807): n equals a,t,g, or c
  misc_feature (30808): n equals a,t,g, or c
  misc_feature (30809): n equals a,t,g, or c
  misc_feature (30810): n equals a,t,g, or c
  misc_feature (30811): n equals a,t,g, or c
  misc_feature (30812): n equals a,t,g, or c
  misc_feature (30813): n equals a,t,g, or c
  misc_feature (30814): n equals a,t,g, or c
  misc_feature (30815): n equals a,t,g, or c
  misc_feature (30816): n equals a,t,g, or c
  misc_feature (30817): n equals a,t,g, or c
  misc_feature (30818): n equals a,t,g, or c
  misc_feature (30819): n equals a,t,g, or c
  misc_feature (30820): n equals a,t,g, or c
  misc_feature (30821): n equals a,t,g, or c
  misc_feature (30822): n equals a,t,g, or c
  misc_feature (30823): n equals a,t,g, or c
  misc_feature (30824): n equals a,t,g, or c
  misc_feature (30825): n equals a,t,g, or c
  misc_feature (30826): n equals a,t,g, or c
  misc_feature (30827): n equals a,t,g, or c
  misc_feature (30828): n equals a,t,g, or c
  misc_feature (30829): n equals a,t,g, or c
  misc_feature (30830): n equals a,t,g, or c
  misc_feature (30831): n equals a,t,g, or c
  misc_feature (30832): n equals a,t,g, or c
  misc_feature (30833): n equals a,t,g, or c
  misc_feature (30834): n equals a,t,g, or c
  misc_feature (30835): n equals a,t,g, or c
  misc_feature (30836): n equals a,t,g, or c
  misc_feature (30837): n equals a,t,g, or c
  misc_feature (30838): n equals a,t,g, or c
  misc_feature (30839): n equals a,t,g, or c
  misc_feature (30840): n equals a,t,g, or c
  misc_feature (30841): n equals a,t,g, or c
  misc_feature (30842): n equals a,t,g, or c
  misc_feature (30843): n equals a,t,g, or c
  misc_feature (30844): n equals a,t,g, or c
  misc_feature (30845): n equals a,t,g, or c
  misc_feature (30846): n equals a,t,g, or c
  misc_feature (30847): n equals a,t,g, or c
  misc_feature (30848): n equals a,t,g, or c
  misc_feature (30849): n equals a,t,g, or c
  misc_feature (30850): n equals a,t,g, or c
  misc_feature (30851): n equals a,t,g, or c
  misc_feature (30852): n equals a,t,g, or c
  misc_feature (30853): n equals a,t,g, or c
  misc_feature (30854): n equals a,t,g, or c
  misc_feature (30855): n equals a,t,g, or c
  misc_feature (30856): n equals a,t,g, or c
  misc_feature (30857): n equals a,t,g, or c
  misc_feature (30858): n equals a,t,g, or c
  misc_feature (30859): n equals a,t,g, or c
  misc_feature (30860): n equals a,t,g, or c
  misc_feature (30861): n equals a,t,g, or c
  misc_feature (30862): n equals a,t,g, or c
  misc_feature (30863): n equals a,t,g, or c
  misc_feature (30864): n equals a,t,g, or c
  misc_feature (30865): n equals a,t,g, or c
  misc_feature (30866): n equals a,t,g, or c
  misc_feature (30867): n equals a,t,g, or c
  misc_feature (30868): n equals a,t,g, or c
  misc_feature (30869): n equals a,t,g, or c
  misc_feature (30870): n equals a,t,g, or c
  misc_feature (30871): n equals a,t,g, or c
  misc_feature (30872): n equals a,t,g, or c
  misc_feature (30873): n equals a,t,g, or c
  misc_feature (30874): n equals a,t,g, or c
  misc_feature (30875): n equals a,t,g, or c
  misc_feature (30876): n equals a,t,g, or c
  misc_feature (30877): n equals a,t,g, or c
  misc_feature (30878): n equals a,t,g, or c
  misc_feature (30879): n equals a,t,g, or c
  misc_feature (30880): n equals a,t,g, or c
gaaggaaatttgtgattagaagccgcgctgttcttatttaagagcgttagcgcaacttccggtattgttgcaagatggccgcgcccagtgatggattcaagcctcgtgaacgaagcggtggggagcaggcacaggactgggatgctctgccacccaagcggccccgactaggggcaggaaacaagatcggaggccgtaggcttattgtggtgctggaaggggccagtctggagacagtcaaggtagtttgggacaggaagtggagaagtagtaaatcgataggttgggactccgtggaatgagggtaaggggcccagagtggatgtagaaagcagagaggggtgaaagatgcttttgaaggaaggtggcttggttggctttgcgttgatttgacatcctgggatggtagtactcatttttctttctttttttttttttttttgagacggagtctcgctctgtcgcccaggctggagtgcagttgcgcgacctcggctcactgcaacttctgcctcccgccttcaaacagttctcctgactcagcctctggagtagctgggactacaggcaggtgccaccacgcccggctaatttttttgtatttttagttcagatggggtttcaccatgttggccacgctggtctcgaactcctgacctcaagtgatccgcccgcctcggcctcccaaagtgttgggattagaggcgtgagccactgtgcccggccggtagtactcattttcttttgctctttttgaatgatattctagccctcacctccttgcttccaattggtttaccaggattctgtggtatagtagtctaagcagaggaaagtttcgttccttgcgtcattccacatcccaagacaagttactgggcagatgagaaacgtagttatgtagcctagtctgcccacactttttgtaagggcttcgtgtttcaattcattagtatccatagtcacctctctctaatatccacctatgatacactgtccagacctggttattatttaaaacttttacatctgcatttttatctatcattcatctctttccccacatgtaatagaaccagcagttctctatcttaaagccttgggcagtgttcttcctcctcctttctcttacccgttagaactaattgaataggcccagaagaaatcgcattggtttagaagtcaggccaggattttaatcttcgttctaaatacacttttttttttttttttttttgagatggagtctcagtctctaccaggctggagtgcagtggcacgatcttggctcactgcagcctccgcctcccgggttcaatcgattctcctgcctcagcctccagagtagctgggattacaggcctgcgcctgtaatctattaaaagaatagaaaacatgattatatcctactaatgggttgaaactgtattattcattcaagaaggtttttttcttctataactaagggtgtctcatggacttagttcttggtcatttgttctttgtgctctctgtgacattacttcaactattcaatttcaaaatctacatcccttttttcgcagactttttggagccatatatctcaagaatgttgctagacatatacattccagtgatacataaaaacttaaccttccaaaacttgtatttgtatataacagtttgtttttagactttttactgaccaccctaatgctccttgggactccaaattgcaacttggaattatttcttttagctgctacagatgtagtccacttctttaacatcaaacttctgatgtcttttccagtgtacagagagttgttaggatagtgtctgtcagtcattcccatcctgccctgcttactccagaattatttttggctttgtgcttgatacattaggattctgtggtttacaaagcagcttcatatataatcactgccctttagtgtctcagctcccaattttcctcaaaatttcctttcttcgtttccactttttcttttttgtttcttttttgagatagggtcttgctctgttgcctgggcaacagagtgcagtggtgtgatggttcactgcagcctctacttccctggctcaagcagtcctcccacctcatcctcctgagtaactgggactgccagcaaatggcactgcgcctggctaatttttttttttttttttgtgagacagggtcccaccgtgttgcccaggccggtctcaaattcctgggctcaagtgatccttccacctcggcctcctaaagtgttgggatcacaggcataagccaccacacctggctactttgtcttgattccatctgtacctttgctcatgccagtctttcttttttcttttttttgagacagggtcttgctggagtgcagtggtacagtcttggctcactgcaatctctgtctcctgggctcaagccatcctcccaccttagcctcccaagtagctaggactacaggcatgtgccaccatgcccagctaatttttgtatttttagtagagatggggtttcgccatgttgcccaggctggtcttgaactcctgaccttaagtgatttgcctgccttggcctcccagagtgctgggattacagccgtgagccactgcatctgcccccatgcccgtcttaaaactgggaataacccctcttccttttacttctgagagttttctttgattaaactgcctcctgcatcattagttttcacatttcttttttttgagatggagtctcgctctgttgcccgggctggagtgcagtggcgctgcaagctccgcctcctgggttcatgccattctcctgcctctgcctcccaagtagctgggactacaggcgcctgccaccatgcccggctaattttttatatttttagtagagatggggtttcaccgtgttagccacgatggtctcaatctcctgaccttgtgatctgcccgcctcggcctcccaaagtgctgggattacaggcgtgagccaccacgcccggccttcacatttcttgttcagatttgcagctcttcacttagtgcatgtttggtgtacgcaaactgagggtggtgactcgatattttgcacagtacctacttactgctcctgtaataaacacagcattcagccttgctaactactaactcctgcctagttccaggatgtctcattggccttgcctaacagccacaggttttttaattaaatccagtgtattagtagataatgtgaagtcacaggttgtgcccttcctcctgtttccctctcagaccattcactggggagtgcaaataaggctgcacagtaatcccccgaagggcttgctgggctccacccccagtgttcctggtttagtaggtctagggtgggcctgagaatttgcctaacaagtttccaggtgcagctgctgctggtagtttggggaccacacttgaagaaccacggggctaggtaacagaagcttatgctgttctctcgtcatgttccctgttcttcaggtagggaagacatatgagctactcaactgtgacaagcacaagtctatattgttgaagaatggacgggaccctggggaagcgcggccagatatcacccaccaggtaactccagggacagtgctcacaaccctttgagcctctgtatggaagggttggcagctgagtgctgcctctcttcagccttaaccatgtctcggtttctgctttgctcagagtttgctgatgctgatggatagtcccctgaaccgagctggcttgctacaggtttatatccatacacagaagaatgttctgattgaagtgaatccccagacccgaattcccagaacctttgaccgcttttgtggcctcatgggtaagaagccttagaacaaagttagaatgaacttgtcagtagggaagaagggaggaagaggaaaagggagaactaaatgtggatttttaagcgagaaaatgggagaacaacatgattaataccaggacaaggactgttattatttttctatgtttgtggaaactccactcctgttcttgcagtagcttcctggctgagtgaaagagggagtctgaacccatcactgtacagctagccatatgcttggcaactgtttgttcctaacatttcaggagtccagtctagatataaagcacacagggaactcatcttatccatggggttttccttgttcgatgactggacagaaggactgtggtctccatctagctctgaactcttttttcccccttctagttcaacttttacacaagctcagtgttcgagcagctgatggcccccagaagcttttgaaggtgaggtattgaaacctgttagttgaaggctggttctgggaatgtttctggggctgacttttctctcttttttactttaggtaattaagaatccagtatcagatcactttccagttggatgtatgaaagttggcacttctttttccatcccggttgtcagtgatgtgcgtgagctggtgcccagcagtgatcctattgtttttgtggtaggggcctttgcccatggcaaggtaaggtctgggctcaaccctgaaattcttggtagagctgaacttagtatagaattcccagagcagtaggcattttaacaatgcttacaatgagctagaagacacatgacagttccacaccctgccccagggcacatcctttgagggctgctgccataattggaagtcacagttaggaccttcttcatcctttgtagggatttgatattcaacagcacagctgaaatactagctcagccatagttttcctgccctaaagaagggctgaaacagctactgagtgacagagttggctgacaaaactgttcttttcttaggtcagtgtggagtatacagagaagatggtgtccatcagtaactaccccctttctgctgccctcacctgtgcaaaacttaccacagcctttgaggaagtatggggggtcatttgacagtagtagaacctgttctgaaaccagaaactgttgatgtcacatcctttgaccctggtctgagctgactgctggaagatgatctttctgcactgagactgtggagtttggggaagccaaggctgtacatttgctatttgtttatcctatgaatactgttcttgcaaacctggttgttttggggttcctaaagtatccagtggtgtaaaactgtttgttccccgggacttcagggacagataggaggttacagagtttgcagtttggttccatgctttgaaggcaggctttagctcccagattcccatgtgctaaaggagagaaccctgatgatggagaagaactgtgaaagagagcagtcaggaatgctagtggtgaaaaactgaacaaacagaagtgattttatctaatacagttccaaggtagaaaaagtggagcaggcagggccttgcacccctctccacccccccatggggggggtggtggtagcggcacatacacaatcatagtaaattggcagaagaaaaacacaatagattcctggctagatggggagagataaggcaatgtgcatgggggaatcagaggggagatgtgagcccctctgctcctcccacaagagtttcccctttgggccgggcacggtggctcacgcctgtaatcccagcactttgggaggcggaggcgggtggatcacttgcggtcaggagttcgagaccagcctggccaacgtggtgaaatcccgtttctactgaaaatacaaaaattagctgggcatggtggcgtgcctgtattcccagctacttgggaggctgaggcaggaaaatcacttgaacccaggaggtggaggttgcggtgagctgagatcccgccactgcattccagcgtgggtgacaaagcaagacgccttctccaaaaaaaagtttcccctttggccccaaatgaagacttggctggcagcagaggcacagctggaagcatcgatcttccacctccctggcttttccattctctgctctggggcaaaggagtgctgtgaaaagggagacgagtagtttctgcaccagtcccgcacaggccacctgcaagacaagaggagtttggaaggctggttagttactcctgtaattcctggtctatagcccttccagatgtttcctagcatgcctcaataagtcacagtagtcattgcccatactgtgttccttagtagccaggctaatccttggaattcaccccagatttctaatactattgtttttttccagtctgttgctctattctgtaacctggtggtagttttagtttagctgtattaacttaccagggaaatggattattccatcttctttaacttctctttccttggcaccattgctttgtgaatataaggcaatatgaatagtaggctcaggaagaagatgtggccaaggaaatagatggatttatacacctgtggagagagaggccactaaggtagacaggcctggagtgtcctttgcaacctttgaggttgcagtgagtccctcccagtctcacaagcaggccttcacttgccttaagccatttgtcccacgtgaagaggcagaaggcagtcatggagtaacccatgaagagccagtggatggtctgttgcaccaaatagtagaagggctggaggacagtaatggcggccagcttgctcagggtggggctctcttgaatgagcctggcagcctggggagggaggaggagctcatcagcatcttgtcccttatattccccttcacccccaccctggaggcctacctgtctttccacaataacaatgaggaattccatctggaagcagaccaggtatcctgagtgcaggccgtgccagagggccaggaatagcaacgagagaccctgagagagttctttatttccaaggaacttgagtcgtttgaagatgtagctggagaaaagggtgggtggggcgaccctcaaactgactggtccttgcatcccgccacctgcctctgggtcctcaccctgaggattggattggagtgctggtgggttcccacgtgtagcccccagagggtacaggaggcagtgctgactgattacttttagagatggaaagcagacccaaggcggagctggagaccgtgtgcgcacgagccacttggttcagcagcagtgactgaggctgatgctgagatcagtggtgaaccagacactctactcaagctgcccacactctagtggtggggacaaacaagtaaagctgttgataaacagggcagtggaggacataagtccattggcagagctggagtaacacccaggtcttaacgcacttttatatcttgcctttttttcaaatatgacagtaatggtttttttgggaggggggtataggtgggggtcaaagtcagtgtgagcgacagggggttctgcccagatgggaaagacgcataggggtgacatggtacacccctgccctccaatctgggaagacagtggaaggaaggaaccagggtccaggctccccaccagcagctcaccgggccacccaggcgttggtgttgatgttgaatgaggcaatggtgccagtgaagcgggggtttgtttcaaagagccacaccttcatgttggcacaggcatcccactttgccttgcccttttcttcaaagccattgaagcccaggcccgtcaaaatgcatactccttcctgagagggaatagctcagttagggctcttgccactccccatactggcccccatggcttgtctaaataggaccttgtttcaacttttctacttactgtgaccagccaacaggtgacatatttgtacagcacaaacttgccccagatcagcatgtacatgcagcggaaccagaaggggtggttcttgagggaagaaagcacagtgcattagggatatcacatgactaggcagtttctctcagcactcttccttttcacacttgtggctggctacttcatacctgcctgagtcctgctgccagatgccctcaatagtctggcctgattgccttcacaataggcagagaggaataagcagagggcctggagaatattcattcgcctttcccttggagagcctcaagggcagcactgtatttaacttctctactgtttgccttcgttggcaaagtgtttggaatgagcatttggaatgttaagtacagaggggcccatattggattttaatttaaggagagaaacctgcccagaattactgaactgttttcaagcctttcagctgggcaggagcaaaagccagcacttccccccttcccttggtttctgaattccctagaagtgcccaaatgtatcagtcaagagaagaaaataggatggagaatcagaagctgctgtgctctgaggggtcacgtggatgtgataaggcaagctaggagcggctcctagagaaggcaacgggtgctaaatgtgcacctggcacagccctgtgcccgcgaaggttgttcagtgctggctgatgaacatgtcccagcacggctggcattgacaactcacagatctagagcaaaaccaacatgcacttgtagatgatatttcctacttctctgctatctgtagggatccttgcctgtccattttctagctctggtgcagtcatgctgctgctgctttagtagacactcacgtcatagtcttcagtgaggagatagtcttctgtgatgtgggggctgagcagtgtgtagcccactaggtagaaaaggcccagactcaggcgcttgagagcaggaatgatgctggaaaggaacgagtgaagttcctggtcacagagagcagagactattcccttcaccctctgaccttcagttatggagaggagtgtttaggggtgtggttgtctacctggaatgggatgagaagctctgctgcccaaagtgtttcctgtttcagggaaagatttctatggctggctatgaggaatggggactgcaaacctcttaagagttgtaggaaagtcagggcagcagacagtggaccagtcttgtgtttacccctcagggatgctactgatctcaaggtcttgccaggtctcacaatctccattgggactgaaaacccagtggaggtaagataataaaaataaccactttgaatctgctccttcatttcttggttgaattgatgctgaaacacaggatggacaagttctcagtgaaggaattcttctggcaattaaactttttttttttttttttttttaccattttaatttttattttctagagtcagggccttgctctgccactccggctagagtacagaggcatagtcattgctcgctgtggccttgaactcctgggctcaagcgatccccttgccttggccacctgagtagctgggactataggcatgtaccaccttgcctggataatttttttttgtagagatggggtctcactatgttgcccaggctggtcttgaactcctggcctccagtgatcctcctgccttggcctcccagagcgttggcattacaggcatgagccactgtgccctcctgcatttcctactgataaatatttttgagacaggattttgctatgttgcccagaatggagtgcagtggtgtgatcaaagctcactgcagccttgacccacctcccctggactcaagcaattctcccacttcagcctcctatgtagcttggactacagatgcatgccactatgtctgataatttttgtatttttttgtagagacagagtctctctatgttgccaggctggtctagaactcacgggctcaagtgatcctcccacctcggcctcccaaagtgctgggattatagaggtgaaaccactgtgcccagcctctatctacctacctacctatcaacctgcctacctacctatcaatcataaatatatttcatatatacatgaaaataggctttaaaggcagaaatgtgactggttcaggcaaaatcctgtggcataaatgtggatttttatgtttgtactagtgttagaatggataactggaagaaccctaaactaaaaagggcccactcctggcacagagtgcctgttacaacagtccagggcctgcatgactcaggtctctatgccagggtcatgctggagaatgcagctttcagaagagtcacttcagagtgagtgaaatacctacacaaacatctggaccaagaggggcaattacctgtttggtatctttcctggtatgtcaatcagctctccctgcaccagcttcatgtagtgattcattgagaactggggccctaccaagaaggccccatagaagtaggagaaaccagcaacttccagcagggaaggaacaccacgtatggcatatttctgttgctcagaggacaaggaattctatgccaagaagagaatgcatggttcaggatagccttgaatctccccacaagagccactttgagtgttccccacctgtgtgccccactgactggggttcttcaaatagccttctctttgggggatgacaaatagttgcttcttgtggaaatgcgtatgtgtgtgcatagctggctgttgctgctttagcaaatgccttgctggcattgatctctggactttgtgcaagagctggatcctgggcaaattagatttgttgatccttgctcagtgctatctgaaagggagattgcacaggctggggaatgagggagaggctccgctctggaatttgggttcagtcttttgttaacaacttttttcttccctttcattaagtcttgaacctctctgccgatgaatgggtacttacctgatctttccctccgtcaaagtagtcaacagccaaacctgagcagagagagaacggatgggtagggtggtgggagaggacactgaggatgtggcctgtagactgagtgcagccagaagtgtatggcggggggcggagggggggtgccgaggaagtttttagtgagatgggggagggacctacatgtaaggaaggcaggcagtgaccatcactcaccaatcagcttcaaagtcagaacacaatgtggcattgtccacttgatatcgtagttgccggtggcagtgtaatagtatccagccagaaggtaggcctaggagaggcagaagtatttattctagcatcactactatttcttctccttgctctgaaattcaatgttctctttcctttttcctttctcctcatcccatcattaaaagccttaataaattcctacaaatggaggtgctgaaaacctgtaatgggaagagcgttgctcaaggcttcttggcaaaatgagggctaaactgagatgagaatttagatgctgggaccacaggtgcatgccaccccacccggctaatttttaattttttttgtttcaccatgttgcccaggctggagggctaatttttgtattttttttgtagagatggggtttcaccatgttgcccgggttagtctcaaactcctgggctcaagcaatctgactgccttggcctcccaaggtgctgggattacaggtgtgagccactttgcctggcctaggcttaggttctttaactcattctaagttgcttttctgtcttgccttgaagtgactctgctcctggatagtgggttaaaccaaagagcctaatggcacagtatgcaaagggttagctggtggcccttccttgaggcaggcaaagagttaccattacaatctgtggatggaacacttgggcctgtgataagccacctacctgaagtcatactgctaagtgctgggagaggggttagaaattaggtctgctaatttctataccacagtcccctgcctacccctgtcccctgaaccgctgtcagctgtagcctgagctgctaagggaaagacgtttaccatctggaagcaaaaggtagtgaggacggcagtgatggtgcggcccattagtcgaaggatgaggaactgaagcacaatacacagcagggagtggtagagctggtttcctggatgcaagaagagagaatttagcctggtttttacactcccaccgtcctgagacttccaatcacaacgtaatatataaagaaaaaatgttggcatcaggatcttttttttcagaataacctcatgttttggaggagaggatggaaattatttattaaaataaaaaagattattagggtgttattttatttcttttctttttttgtttgtttttttagagatgcgacttgctctgttgtccagacttgagtgcagtagctcaatcatagctcactgcagccttgaattccgggctaccacacccagcttgttactgtatttttgaatgtctgaagtgaagaatgaatctaagtggggactgcttggctcggtcattcagttacatccacagcacagagaaactgaggattctttgttgatgaggtatggcaagggtaaccaccctcaaaatgtttttatctgacagaagaatgtacataaaagaaaaaaaggaaaagttaagctgtgttcctcttcatacaaccctctttgcaagtgggagcattataacttccctacctattagattctctcaaggaaattttgttcaagtctgttccttccaggttcccactaattgcggtgtcactgctaatttagtttactcaccaaagttaaaataagcaattgagaggcctgtaaaggtatggaagaggtggatgaggtaggtctccttgtagaaaaggtaatgccgataaaacaaagcaaaggggtaacctagatgggggaaaagataagaagagtgttatttgtgcctggtgccatcccagtttggtttggaagtttatctggcatgaaacgcagcccagagggagagagaaaaaaaaaacaacatacattatatggatggcaacagagaaggcaataacggtatccccaagaaccaaaagttttttgtaaatacaaattttgaactaaagatattaatatttgattgaggcaatataaagctgggtcctaagactaggtttcatttatagcttatgaactattgccagacattttctcttacttgaattttaaaaaatgatacaaggaagctaggcatggtggctcccatgtataatcccagcactctgggaggctgaggcaaggggattgcttgagccgaggagttcgacaccagcctgagcaacatagcgaaaccccgtctctattaaaaaacaagatacaaagatttgagcgtacccatctatgctccagaaacactcatttacactttgtgatctatcttgctagcactgtattatcagattatgaggaaaaatataaattaatatcaggctaaatactggaattgctgactgcatatatagcagttacaagttatgtggagatactcctcacagtctgtaatctgggcatcaaccaagttataaaatccatttaagtatactaaaaaaatgtcttctaaagccatgattcagagtatagtccaaaggccatgagtgaaccacagaggatcttctgatgggtcatgaactgattatacatggccaagggttgcttattgaattaaaaacggtcaataaaatttggtattcctaaactaaaattagcacattccatggctttactgcagactcaccttcagtgttctatctagaggtctggcggccatgcctggcaacatccccactgcactagtgcatatgtggaggatggggatctctcaactgctttttggaaagacattctgcctattctttcattgattattctcttgagttggtcatggtttatactttctgcaattcttgcttttatttttatttattttgagacagggtctcttgctctgtcacccaggctggagtgcagtggcacgatcatcgctcactgcagccttgacctcctgggctcaagtgatcctccaacttcagcctcttgagtagctgggaccacaggtgcttgccaccatgcctggctattttgtaatttttgtggacatgagttctcactatgttgcccaggctggccttgacctcctgggctcaaggaatcttcctgccttggcctcccaaagtgttgggattacaggcgtgagtcactgtgcctgatgaattgctgcgattcttgcttttaaattatgtaactgcagtttttatcatgggcaatacagtttactgtgagtttgcttaactctaaaacgcttagaatagtatcatacagaaataaattgctcaattatttgttaaataagtaaatgcacacaatcatgttatatgttggtttctgtccttctagtcatttttcccccatacattaaaaaaaaaaaaaaaaaaaaggctgggcgcggtggctcatgcctgtaatcccagcactatgggaggctgagacgggcggatcatgaggacaggagatcgagactatcctggctaacacggtgaaaccccgtctctactaaaaatacaaaaaaaaaaattagccgggtgtggtggcgggcgcctatagtcccagctactagggaggctgaggcaggagaatggcatgaacacgggaggcggagcttgcagtgagctgagatggcaccactgcactccagcctgggcgacagagcgagattccgtctcaaaaaaccaaaataaaacaaaacaaaaaactgtactggctggtgcagtggctcacgcctgtaaaccaaggcactttgggaggctgaggtgggtggatcacttgagatccggagtttgagaccatactggccaacatggtgaaaccccatctctaccaaaaatataaaaaattagctgggtgtggtggcgggtgcctgtaatcccagctactcgggaggctgaggcaggagaatcacttgaacctgggaggcagagtttgcagtgagctgagatcgtgccattgcactccagcttgggcaacagagcgagactctgtctcaaaacaaacaaacaaacaaatgccatttgatcttcctggtgccaggatcaactggtgtttttttttttttttgagatggagtttagctgtttttacccaggctggagagtgcaatggcacgatcttggcagctcactgcaacctccggcccctaggttcaagcgattctcctgcttcagcctcccaagtagctgggattacaggtgcccgccaccatgcccagtgaatttttgtatttttagtagagacggtatttcaccatgttggccaggctggtctcgaactcctgacctcaggtgatccacctgccttggcctcccaaagtgctaggattacaggcgtgagccaccacgcccggccaactggtgtttttttttttaattgctgttcccataataggctaggctcttaaatttatagcttcatgcaagtatagttgacccttgatcaacacaattttgaacagcaagggtccccttagacttccctctgcctctgccactgctgagatggcaaccctttctctttctcctcctccttgcctgctcaacctgaagatcatgaggaggaagacctttatgctgatccacttccactgaatgaagagtaaacatattttttcttgcttatgattctcttaataacattttcttttctatagtttactttatggtaagaaatacatatataacacaaatgacatacaaaatatatgttaatcaacttgtttatgctattggtaagtcttctattagtagttaagtttttggagagtcaaaagttatatgtggccgggtgtggtggctcatgcctgtaatctcagcactttgggaggctgaagcaggtggatcacgaggtcaggaaatcgagaccatcctggctaacatggtgaaattccgtctctactaaaatacaaaaaattagctgggcatggtggcacacacctgtagtcccagctactcaggaggctgaggcaggggaatcgcttgaacctgggaggcagaggttgcagtgagcagagattgcagtgagcagagagagccactgcactccagcctggtgacagagtgagactctgtctcaaaaaaaaaaaaaaaaaaaaaaaaagttacacctgtcggccgggtgcggcagctcacacctgtaatcccctactttgggaggcttaggcgggtgggtcgcctgagatcaggagtttgagacgagcctggccaacatggtgaaaccccatctctactaaaaatacaaaaattagttaggcgtggtgcaggcacctgtaatcccacctacttgggaagctgaggcaggagaattgcttgaacccaggaggcggaggtggcagtgagctgagatcacgccattgcactccagcttgggcaacgagcaagattctgtctcaaaaaaaaaagaaaaaaaagttttatgaggatttttgactgtacaaggggtgggatcccataggacctgcgctgttcaaggctcaactgtaattaattctacagatatcttatggattactggctcatgtattcattcaccaagtgtttagtaaatgcctgctatatgccaggtattctgtttatgaagcacgtaattgggtaggaggtggcatgtgatggttcgttttctagctggctgagatgatgggatataggatcactagctctagggaggtggagacatctatgaccctttcaggtagatcaatgagcaaggaaataggatcaagtctcatatatttcacatgggcagaaatttggcagagacagaacaccaggttagcagcaaatattgctaagaactagagccaggaactagaaagtatatagactaaatgtcaatgccttcaatcttttgctttatttttacttttgttttagtaacggggtataaataaaaaaatataaaacagtagataattatctagagcactcataaataagttctaggtagctaagtttctctctttaagcatgaaaacccttaaccatttggaatgctcgaaattaaaaaacaccacacatattactctgcctctttaagttgaatctaatttaacattttctaggtgtctggatcgtatctattccagagtaaagtcatgatggctttatgacgttctgaggtatgtgaaattgtctgcctgactctaacaaggcctacactgtcctgagttctgagttcttgtgtccacttcttatagcctgtctgtccctttccttgctactctgggatcaacagtcacctcttgaacttttggggtgcttggcaatagttcctctccctactcctaatttacggcaggccttagaaaccataaccttattttaaaggtgtaaaaaaaaaaagatttaagacaaaagcaaggggcttgggtgctttccttatggacttaggcctggtaacatctgttctggccacttagaggccttgtgtgctatttcttgttttcaggtgcgttttgcaggaggggacgttgttgagttccaaacaggtgaggtattgcacactagcaaacacatgagaagaaggcggaggaattgggagaaaaataaaaagaatgcagcaggccaggttagcaggaacgttaagacggtgacggagaacagcaaagcctggaagcaagccgccgtggagaaggaagaactgtgctgaggtgagttgctgtgacaacccaggctgattttgagtatgtaaacaccaaaccttgttcttggctgccgctcagctcagcgggctttggagcctggctgcccagccaccacttcagggatgtgctgtttttagggagggtgtgaccctacaagatgtttctgagccttaatgcttttttgtgggagccaatgcttaatatggtggctagagttacctgaagaatctataaaaaatgaccgaagccccttctgctcaccctcccactcatcagagttggcttccgtgggtctgagtgggaaggacttccacttttaacagcatgagacacggttctgacagccccactaacatccgaatgcaggccgcagtgctcagtcctgaggataaaattctcagcttggagattggggttgatgccttacctttattagcaccagatgggtttgtaacaacccagaggtttgtaagaacttgttggccgggcgccgtggctcacgcctgtaatcccagcactttgggaggccgaggcaggcggatcacctgaggtcaggagtttgagactagcctcaacatggagaaaccctgtctctactaaaaaaaatacaaaattagctgggcgtggtagtgcatgcctgtaatcccagctactcgggaggctgaggcagaattgcttgaacctgggaggtggaggttgtggtgagccgagatcacgccattgcactccagcctggcaacaagagcgaaactccatctcaaaaaaaaaaaaagaacttgtttggcagcactgtaactgttccttctttttgattgtttgtttaaagcagggacttcagaaatttattagcaggcgaaggatgatgacctttagtacactccaaacctgaggatcttctactagaatgggacctttataatccctaatgctagggacattcaaaatgcgtgttttttttttttttttttgagacagagtctctgtcgcccaggctggagtgcagtggtgcaatctcggctcactgcaagctccgcctcccgggttcacgccattctcctgcctcagcctctccgagtagctgggactacaggcgcccgccatcacgcccagctaattttttgtatttttagtagagacagggtttcaccgtggtctcgatctcctgacctcgtgatccgcccgcctcggcctcccaaagtgctgggattacaagcgtgagtcaccgtgcccggccaatgctgtggtctttcaagcagctgctgggatacatttaatttgtacaagccctcttcaggggttgtagtcaagcacagggagtggatagaactgtattattcagtctctggacttcactcagttccaagtgctgtttgtgtcagggaccagatctatcacaacgtgcattgttagcgggaacgttttcttatttcctgtacaatagttgtgagattacttattaatcctaaagttgtgaggtttcatctgaagaaacagaaatggactgtttccattaagtctggtaaatttggctgggagtggtggctcacacctgtaatcccagtgctttgggaggctgagacgggagaatcactggaacccaggagtttgagaccagcctgggcaacatagcaagactctgtctctacaaaaaataaaaaaaatagttgggtggggtgggtggtgcgtgcctgtagtcccagctacttgagaggctgaggcaggaggatcacctgagtctggggagacagaagctacaatgagctacgatgatgccactgcactccagcctgggcaacaaagttgttttttttgagaccctgtctcaaaaataaataaataaataaataaaaataaaaaaaatataagcggggcacggtggctcatgcctgtaatcccagcacttcgggaggctgaggcgggcggatcacgaggtcaggagatcgagaccatcctggttaacatggtgaaaccctgtctctactaaaaatacaaaaaattagccgggtgtggtggcgggcacctgtagccccagctactcgggaggctgaggcaggagaatggtgtgaacctgggaggcagagcttgcagtgagccgagattgtgccactgcactccagcctgggcgacacagtgagactccgcctcaaaaagaaaattaaaataaaataaataaataaataaataaataaataaataaataaattgagcaccccaaacaacttttgttaatgtgggaactatatatcaatgtctactgtgttagaaaataagactaaaaactgggtgtggtggctcactcctgtaatcccaatgctttgggaggccgaggtgggtggatcacttgaggtcaggagtttgagaccatcctggccaacatggtgaaaccctactaaaaatacaaaaaccagccagacatggtggcaggcgcctgtgatcccagctacttgggaggctgaggcaggagaatcgcttgaacccaggaggtgggggttgtagtgagctgagatcacgccactgtgctccagactaggcaacagagcgagactccaaatcaaaaaaaaaaaaaaaaggaagaaaataaaactaaaaaaaaagtaaaagatatgattaattcagtaaaaatattaacagtaaaactactacacattatattaatataaataacatactttaaatgtaaaccactatatttcccaaaacaatcaaagaaataaagccatctaatgagaagaatgccactgttttacattttcataaatttatggcctctgtctgacttaatagaagatgactggattctcaaatctgcttctgcatttaatctgttgtaatatgttagtttggttaaaatatacaaagaaaatctggctttacacagacagagaaagtatctgcattttcagataattttggatattctttagcgctacatcaaaacttgacaagtagtagtttcttaacagttaggaacttttgttataataaaacccattggcttctcttgcactttgaatggatattttaccatgcatgactttgtaacatcacacatagatcactgcaaaatactggttccctgttgttaggcagatcttctaaatactgacatatttcattagaatacatatcaaaaaatcatattccttaaatttcaccattgatttcagcagaaaagtctgtatatattgaaaagtggtcaagctcatgggagtggatacaagttttccaaaattctaatttttacttgaaagtgtaaattttatcactggctacaaatattgtcatttgtttaccttgaagtgacaggctcacttcatacagtttcaagagactgtctgccagatgcctaagtctaaaaccatagtttgtctatcattctttcaagtaaaaatggtggtcggtgaaaaaagaagctgctaaatcaatatgcaacttgaataatcgcccaaatgcttttccttgtgacaaccaccgtactctaccagtgtgcagcagaggcggtttatgcatatttcccatttcttcaaacaagtttaaaaagatgtactcaggatcaggcatggtggcccacacctcccagcactctgggaggccaagacgggtagatcactttaggtcaggagttccagaccagcctggccaacatggcgaaaccccgtctctactaaaaatacaaaaattagctgggtgtggtggtgcataccagttaaaaaaaaaagatttattcaaggactgacatttgatacaattaacaatatttagcctgggcgacagagtgaaaccccatctctaaaaacaaaacaaaacaaaacaaaaacaaaaattagccaggtgtggtggtgcacacctgtagcctcagctactcaggaggctgaggtagcatcacctgagcccaggaagttgaggcggcagtgagctgtgatgcccccaccgcactctagcctgggtaagaccctgcctcaaaaaaaaaaaacaaaaaaaatttaccacttcatcaacgattcttaagtgaaactggctctgttttgattgtgagtgcatggcagtaaagaatgcagtgaccactggtacagtttggtgtcaccgtcctgatttgtgctaaggcgccagcagttttaccaccattttgcaacatcagtgcaagtgtcaacatagggaaaagacaaatacatcttagtagtatcatgaaaataatttttaccccaaagagattccttaaagaagtctcaggaacttttaggagtagtctatggactgcatgctgatatggaatgatttgttttaatctttcatcttctaatacccaaatccactagtctttcctttctccctggtttccttgactgccctgctgtgttttcaatctttttgaaacttctctttcactggtttcattggttttgaatacagttatctcttggtgtccatgaaggattggttctagtactcgcagcagacaccacagatgctcaagtcccttatataatatggtgtagtattgcatgtaacctatgcacatcttcacatacactttaaatcatctctggattactcataatacctaatataatgtaaatgcaatgcaaatagctgctatatagcatattgttttttatttatatttttattattgtattattatttagcttagaatccatgaatgtggaacccacaaatatggagggctgactatacacagtttcctggatttttttctactgagatataatttaccataaaattcacccttcaaagtgtaaaatgtaatgttttttagtatattcaaaaggttgtcgccgggcatggtggcttatgcctgtaatcccagcactttgggagccggaggagggcagatcacgaggtcaggagatcaagaccatcctggccaacatggtgaaaccctgtctctactaacaaaaaattagctgggcgtggtggtgcctgcctgtagtcccagctactcaggaggctgagggaggagaattgcttgaacccaggaggcagagattgcagtgagctgagattgcgccactgcactccagcctggcaacagagcgagactccatctcaaaaagaaaaaaaaaaaaggttgtgcagccatccccactatctatctaatttcagaatatcttcatcacctcaagtagaaaccccatacatgttggcagtcatttcccattctctcttaactcccagagcctggcaaccattcatctactttatgtctctatagattggcctattctaggtgtttcatataaatggcgtcaggcaatgtgtagacctttgtgtctggcttatttcacttagcatgttttcaaggttcatccatgttgtagcatgtatcagtacttcattcctgtttatggctgaataatatcccgttgtatggatactctgcattcttttttttaacatttaaaaattttttatagacaaggtctcactatgttgctcaggctggtcttgaattcctgagctcaaatgatctgtccacctcagcttcccaaagtgctaggattgcaggcatgagccactacgcccagcctggatactctgcatataatctacccattcatcagctgacaaacaactgggttgtttccactttaggaacattatgaagaatgctgctacaaacattcatgcattttgtagagacagggtctcactatgttgcctaggccggtcttgaactcctggcctcaaatgatcctcctgctttggcctcccagagtgctgcaattacaggtatgagcccatgtacaagtttttgtgtgaacatatgtttttatgttttcaattctcttgggtatatacctaggaatggatctcctggatctttttcttttttttccctttgggacagagtctctctgtgttgtccaggctgaagtgcagtggcatgatcttggctcacggcaacctccgcttcccaggttcaagtgattctcctgtctcagcctcccgagtagctgggattacaggtgtgcaccaccatgcccagctaatttttgtattttcagtagagatggggtttctccatgttggccaggctagtctcgaactcctgacctcaagtgatcgacctgccttggcgtcccaaagtgctgggattacaggcgtgagccaccgggctgttgcccacgctggagtgcagtggcatgctcacagctcactgcagcctcaactttctaggttcaagtgatcctcccacctgagcctccctagcagctgggactacaggtgtgcacaggaccggctaatttcttgtagagttggagtttcaccatgttgctcaggctggtctcgaactcctgagctcaagcaatctgcccgccttggcctcccaaagtgttgggattacaggcatcagccactgtgcttggccaatgttcactcttactttctgtgcttacttctggcatgggttggctgactacaatttgaatagacccatctttccgtttctttcaccgaaggcattttttctggctcctagatgttgctgacccccaggatccagtcttggccctccactattcttgctacactgcttctttggaaactcatctactctcaagtaacttaatataatctttatgccaaagacagatccacatctttagttctaacttctttttcagttccacatttcctacttccttgctggacagttttaatttgatatttcattaccatctcaaactctgtataactaaggcataaatttctccctaaatcagccttctctgggctttttttttttttttaaattaacagtgttaccattctccaggtcacacaacattcaaaagtgtgttttcctgccagggcatggtggctccacgtctgtaatcccagcactttgggaggccaaggcaggcggatcaccaggtcaagagttcaagaccagcctgaccaacatggtgaaaccccatctctactaaaaatacaaaaattagccgggcgtggtggtgcatgcctgtaatcccagctactcaggaggctgaggcaggagaatcgcttgaacccaggaggcggaggttgcagtgagctgagatcgtctcactgtactccagcctgggcaacagagccagactccgtctcaaaaaaaaaaaaaaagtgttttccttcttcatattggttctctgttatctagtcatgaaatcctgttgattcctcctttccagtctctctcaccatcactgtcaccatgaccatcaccactccctttttcctctgctgatttgcagttaaaacccttatggatctcacccttaaatccttgcaatggcctcctacctgatctctgcctgcaccacgtcttcccagcagtcctataccggggtaatcttccttcagctcctgctcagaaaccatcaatagctcccagctgactactcaacagagtcagcaatcctgtctgttctaccttcaaaataaatccaaaatctgaccacttctctccgcctctactgcttcccctggtctgagttgccactatctctggattattattattaatatatcattattatattcaatgtattatcattatatacttgcctcctgactgatctcaccctgcctttgcctcccttcagtctagccttaatgaagcatctagagggttctattcaacttaagtcagcaggtcactcctctgctcaaagccctctcaaggcctctattctcactcagatcaaaaggctgattgccagcacccgcaggttctgtccctctgcccgggccccactgtcctctgactcatctctcaatctggcctctacccttctgctccagccccaaagctttcccttcctggaatgttaagcaggtccagccttggtgccttcacatggtaagttccttgcctggaaggctctttgcacagataagctcaaatccttcctacacctcaggtcctttgtaaaatgtcaccataagtatcagtgaggacttccctatcttatctagaagtgtatacaacactacccctccccaccctgtaaccctcccccatcacacacttcttgttcttctttcctgctttttctatttttcttctcagtacttattaccttttgacataccatatatcttacttttcagtctttcaaagcagggattatcatctactttagtccctaccgtaccccagtgcatagtacagttcctggtacacaaaatttctcaaaaagtattagctgaatggccgaacaatgagtgaacaagtgctctgtactctaggcagtcaatacaatatttattaagcactcactatgtggttagcattgcattaggcattgggggaatatggtagaattttaagaggtgctttctattcttaaggagcaaaatcaaacaatgatgttctatgctaagggctaactgtatggaatagccaatgttgtagaggttaaagagaaatcaatctcgaccacagtggtcgggagaagtagttcttgaacagagaagagatgacggcattccaagggaggataatgtagtaaagacacagcggtaggaaggagcatggggcattcactccaagagactgggctaatttcaagggaggaaaaatattgtaacaaaatggatgggaaagtgaaaaaccaggcagagtctgaaattgataaatgggaaaaaaaaaatcaattgactaggtgtaggagaaggaaaaggacaaattaaagatgtttatgccactgatataatggtcttcaggtcttcaaacctttttgctggcatagctcctagaagaattttgaaaaactgtatatcctcctttcacattttaaagttgccatctaaaccttatgtttttatttctttatttttttattttcttgagacagtacttcactctgttgcccaggctggagtgcagcggcacaatcacagctcactgcagtttcaacttcctgggttcaagtgatcctcctgcctgagcctcccaagtagctaggactataggtatgtgccgccatgcccccaaaacaacagcaaattatgtgtgtgtgtgtgtgtgtgtgtgtgtgtgtgtgtgtgtgtgtgtgtgtttcaagacacagtctcactctgttgcccaggctggagtgcagtggtgcaatcttggcttactgcaacctctgcctcccaggttcaagcgattctcctgcctcagcctcccaggtagatgggattacaactgtgtgtcaccatgcatggctgattttcttttctttttttttttttgagatggagtttcgctcttgttgcccaggctggagtgcaatggcgtgatctcggctcaccgtaacctctgcctcctgggttcaagtgattctcctgcctcagcctcccaagtagctgggattacaggcaggcgccaccacacggggctaattttgtatttttagtagagacaggatttcaccatgttggtcaggctggtctcgaactcctgacctcaggtgatcctcctgccttagcttcccaaagtgctgggattacaggcgagagccactgcacctggccgcatggctgatttttgtatttttagtagagtagggtttcaccatgttggccaggctggtcttaaactcctgacctcaagtgatctgcctgcctcagcctcctaaagtgctgggcataagccaccatccctagtcagtgtgtgtgttttgaggcagggtcttgctctgtcgcaaaggctggagtgcaatggcacagtcatggctcactgcagccttgatctcctgggctcaagtgatcttccgacctcagacccctgagtagctgagaccacaggaatgtactaccacattcagataattttaaaattttttgtagagatggcatcttgctatattgcccaggctggtcttgaactgctgggctcaagcaatcctcctgcctcagcctcacaaagtattggcattacaggtgtgagctactatgtttggccgtgtgtgtgctttctaatgcctattgaaggtgtgttttaagtgcttatggcagatgtctgccatgcaatctaaatggcaaaccaatcagctggatcagtcttacttacaacacacctggcctgtccctcaacttttctattctttcaccaaaatggaagttccttatgttagagaacttacagagaaaaggaagacaaaggaaaataggaaggagagttaagctctgcctgacactgtctacttaagtgatgggtaactgattaggttcagtgcttagaacttcatataatgagatacaaaatctcattactgacccactctgccagctagaagagcacttgtagatcatggacatttaggtggggatatagccacctttgatcctttctgttcactagattaagccttgttgctagtacaggcaggagccaacataccttccacactccagcaatcctgtacaccttgggctgagtcatatgctgaacagttattcatgaatacagattcttacttagaactgaagaattacctgctccaaacccttcattaggtagataagagactaaggtccaaaggggataactggcatgcccaaggttaacagagcagagctcaaattagaatccacatcacctgatttccattctactattcttgccacatgccttggcacttggcagtgacctgggagtgaatcactaataaccagctgtgtgctcttttaaagctacagctctattattctttgatgtccagataacaatctatgctccagcacctgtttatagacataagcacacccatttttatgtttgcttatcctcctattgaaaaatattttaaaagttcattttaatgctaaatttaggtgtactttctttgttaatctaattcttgagcactctgcacccttcagcagttcatttctgaaagttacctccacctaaatagctcaagcattgtgacagctgtgatacaggactcatggaaactgggacaagtgatcaaaaatgtctgagggaggaacaatagaggggacattttaaaggtaagctattggatagttgttacctgtgagaaagaaagaaaaagggttaggttaagaaatgttagttttttactctctcaacccagccaaacaacctaaacttgaactgtcccaaaggcctaccaaaattctttaatttcttcacttaagctgagtgctcttaataagcaagacttctgaggtgtagtgctagtgattaatgttatacacacccgttggctgactggtgaaacctgctgcaataactaaaaattattctataaaaatgtatagacagagagaatgttaaagctaaaagaggccgttgactcatttctttgttttagtagaacaggtgcaacagattgaggcactttaagacatctaaatggctttactagcaaagataaaaatcacacttgcctgtactcagggaattttatcacattctaattctttgtaaatcagtgaatcccctggtgcaacttctagccagattatctgggctttggaatcagaattatctagtttaaaatttagctctgcagcttgggcaaattacttacattctttttttttttttttttttttgagacagagtctcgctctgttcctcaggctggagtgcagtagtgcagtcttggctcactgaaacctctgcctctcaggttcaagcaattctcctgcctcagcctcccaagtagctgggactacaggcgtgtgccaccatgcctggctaatttttgtatttttagtagagatggggtttcaccatgttggtcaggctggtcttgaactcctgacctctggtgatccgcccgcctcagactcccaaagtgctgggattataggcgtgannnnnnnnnnnnnnnnnnnnnnnnnnnnnnnnnnnnnnnnnnnnnnnnnnnnnnnnnnnnnnnnnnnnnnnnnnnnnnnnnnnnnnnnnnnnnnnnnnnnnnnnnnnnnnnnnnnnnnnnnnnnnnnnnnnnnnnnnnnnnnnnnnnnnnnnnnnnnnnnnnnnnnnnnnnnnnnnnnnnnnnnnnnnnnnnnnnnnnnnnnnnnnnnnnnnnnnnnnnnnnnnnnnnnnnnnnnnnnnnnnnnnnnnnnnnnnnnnnnnnnnnnnnnnnnnnnnnnnnnnnnnnnnnnnnnnnnnnnnnnnnnnnnnnnnnnnnnnnnnnnnnnnnnnnnnnnnnnnnnnnnnnnnnnnnnnnnnnnnnnnnnnnnnnnnnnnnnnnnnnnnnnnnnnnnnnnnnnnnnnnnnnnnnnnnnnnnnnnnnnnnnnnnnnnnnnnnnnnnnnnnnnnnnnnnnnnnnnnnnnnnnnnnnnnnnnnnnnnnnnnnnnnnnnnnnnnnnnnnnnnnnnnnnnnnnnnnnnnnnnnnnnnnnnnnnnnnnnnnnnnnnnnnnnnnnnnnnnnnnnnnnnnnnnnnnnnnnnnnnnnnnnnnnnnnnnnnnnnnnnnnnnnnnnnnnnnnnnnnnnnnnnnnnnnnnnnnnnnnnnnnnnnnnnnnnnnnnnnnnnnnnnnnnnnnnnnnnnnnnnnnnnnnnnnnnnnnnnnnnnnnnnnnnnnnnnnnnnnnnnnnnnnnnnnnnnnnnnnnnnnnnnnnnnnnnnnnnnnnnnnnnnnnnnnnnnnnnnnnnnnnnnnnnnnnnnnnnnnnnnnnnnnnnnnnnnnnnnnnnnnnnnnnnnnnnnnnnnnnnnnnnnnnnnnnnnnnnnnnnnnnnnnnnnnnnnnnnnnnnnnnnnnnnnnnnnnnnnnnnnnnnnnnnnnnnnnnnnnnnnnnnnnnnnnnnnnnnnnnnnnnnnnnnnnnnnnnnnnnnnnnnnnnnnnnnnnnnnnnnnnnnnnnnnnnnnnnnnnnnnnnnnnnnnnnnnnnnnnnnnnnnnnnnnnnnnnnnnnnnnnnnnnnnnnnnnnnnnnnnnnnnnnnnnnnnnnnnnnnnnnnnnnnnnnnnnnnnnnnnnnnnnnnnnnnnnnnnnnnnnnnnnnnnnnnnnnnnnnnnnnnnnnnnnnnnnnnnnnnnnnnnnnnnnnnnnnnnnnnnnnnnnnnnnnnnnnnnnnnnnnnnnnnnnnnnnnnnnnnnnnnnnnnnnnnnnnnnnnnnnnnnnnnnnnnnnnnnnnnnnnnnnnnnnnnnnnnnnnnnnnnnnnnnnnnnnnnnnnnnnnnnnnnnnnnnnnnnnnnnnnnnnnnnnnnnnnnnnnnnnnnnnnnnnnnnnnnnnnnnnnnnnnnnnnnnnnnnnnnnnnnnnnnnnnnnnnnnnnnnnnnnnnnnnnnnnnnnnnnnnnnnnnnnnnnnnnnnnnnnnnnnnnnnnnnnnnnnnnnnnnnnnnnnnnnnnnnnnnnnnnnnnnnnnnnnnnnnnnnnnnnnnnnnnnnnnnnnnnnnnnnnncaaaaaaaaaaaaaaaaaaagcgaaaatatttgcaaaagtagcatacatgtacttccttcaggccacttaaaatacttatgcatgtctaaatattttatataagcatacctacacctaacttcttaaaaattgagtattctttttttgagacggctgtcgcccaggctagagtgcagtggcgcgatctcggctcactgcaagctccgcctcccgggttcacgccattctcctgcctcagcctcctgggtagctgggactacaggtgcccgccaccacgcctggctaattttttgtatttttagtggagacggggtttcaccgtgttagccaggatagtctcgatctcctgacctcgtgatctgcccgcctcagcctcccaaagtgctgggattataggtgtgagccactgcgcccggccgaaaattgagtattcttttaatggattttaagatataaaatctcaggctcagaaatttgagccacctaggggtgagaaattttggcctttgcccgcttcgaactgacttaactaaattaaatctatagaaagtaaaaaataaaggtctgtgaatgtacccagtactctcaggaagaagcatatttgccatgaagctaaaaaagcttcagtttcactccccttccaaggctctggggggtggggtgggggcgggagctagcaacgtgctcacatggtcatatatttttgtaaaacttatagaagatatttttgtattctttttcttaaagaagatatccaagattgtataagcttcagatcccagaaatcctagatttaaaaaaaataatcaaccaccaccccaacaaaattaggcacatgcctgaaaattctgctgctactgccagaattctgcgggtaggggcttcatccaaggtgttcctaataataggcagagtccccagattagttccggtgaggcttttgggaggggttatttggcgcggtgttggtgttggtaggatcctggctgtgaggctgaggcaggcctgaggagggctggggctgacaggtaggcagagttggctgggatgtgaggtgcaaggggtggtacttcggaaacaaactttgaagaggagaaggggcagcaagactgtgagtctggactttgtgatacactgtcacccctagtttagtgtgcctggttagggagaatcaagcagcatggaacccctcttcctttttcactaacatttttctgtatagtggttgaaacccagtgttaagagactgcatgacattggaaaagaaggggaggagaaaaagagtccatatga

SEQ ID NO: 257 - DNA, 405 bp, Homo sapiens
ggtgcctgctaccacatccagctaatttttgtatttttagtagagatgggttttcaccatgttggacaggctggtctcgaactcctgacctcaggtgatccacccaccttggcctcccaaagtgctgggattacaggcatgagccactgtgcccagcccaacagagtcatttttataaaggaaaccccccctccctctacccacaaacttctgtgttttacacatcaagtgagttagaggaattaggcatttctttgcttgagttcattcactgttaatcttccaaatgtgtcaccttgagaagctaaggagaggctgagtctcaggcacctgaaatgcggttgctggtcagtaagccccaacaactcattgacaaccagaggaaaaggtgccatggcctccttt

SEQ ID NO: 258 - DNA, 1186 bp, Homo sapiens
  misc_feature (342): n equals a,t,g, or c
  misc_feature (343): n equals a,t,g, or c
  misc_feature (344): n equals a,t,g, or c
  misc_feature (345): n equals a,t,g, or c
  misc_feature (346): n equals a,t,g, or c
  misc_feature (347): n equals a,t,g, or c
  misc_feature (348): n equals a,t,g, or c
  misc_feature (349): n equals a,t,g, or c
  misc_feature (350): n equals a,t,g, or c
  misc_feature (351): n equals a,t,g, or c
  misc_feature (352): n equals a,t,g, or c
  misc_feature (353): n equals a,t,g, or c
  misc_feature (354): n equals a,t,g, or c
  misc_feature (355): n equals a,t,g, or c
  misc_feature (356): n equals a,t,g, or c
  misc_feature (357): n equals a,t,g, or c
  misc_feature (358): n equals a,t,g, or c
  misc_feature (359): n equals a,t,g, or c
  misc_feature (360): n equals a,t,g, or c
  misc_feature (361): n equals a,t,g, or c
  misc_feature (362): n equals a,t,g, or c
  misc_feature (363): n equals a,t,g, or c
  misc_feature (364): n equals a,t,g, or c
  misc_feature (365): n equals a,t,g, or c
  misc_feature (366): n equals a,t,g, or c
  misc_feature (367): n equals a,t,g, or c
  misc_feature (368): n equals a,t,g, or c
  misc_feature (369): n equals a,t,g, or c
  misc_feature (370): n equals a,t,g, or c
  misc_feature (371): n equals a,t,g, or c
  misc_feature (372): n equals a,t,g, or c
  misc_feature (373): n equals a,t,g, or c
  misc_feature (374): n equals a,t,g, or c
  misc_feature (375): n equals a,t,g, or c
  misc_feature (376): n equals a,t,g, or c
  misc_feature (377): n equals a,t,g, or c
  misc_feature (378): n equals a,t,g, or c
  misc_feature (379): n equals a,t,g, or c
  misc_feature (380): n equals a,t,g, or c
  misc_feature (381): n equals a,t,g, or c
  misc_feature (382): n equals a,t,g, or c
  misc_feature (383): n equals a,t,g, or c
  misc_feature (384): n equals a,t,g, or c
  misc_feature (385): n equals a,t,g, or c
  misc_feature (386): n equals a,t,g, or c
  misc_feature (387): n equals a,t,g, or c
  misc_feature (388): n equals a,t,g, or c
  misc_feature (389): n equals a,t,g, or c
  misc_feature (390): n equals a,t,g, or c
  misc_feature (391): n equals a,t,g, or c
  misc_feature (392): n equals a,t,g, or c
  misc_feature (393): n equals a,t,g, or c
  misc_feature (394): n equals a,t,g, or c
  misc_feature (395): n equals a,t,g, or c
  misc_feature (396): n equals a,t,g, or c
  misc_feature (397): n equals a,t,g, or c
  misc_feature (398): n equals a,t,g, or c
  misc_feature (399): n equals a,t,g, or c
  misc_feature (400): n equals a,t,g, or c
  misc_feature (401): n equals a,t,g, or c
  misc_feature (402): n equals a,t,g, or c
  misc_feature (403): n equals a,t,g, or c
  misc_feature (404): n equals a,t,g, or c
  misc_feature (405): n equals a,t,g, or c
  misc_feature (406): n equals a,t,g, or c
  misc_feature (407): n equals a,t,g, or c
  misc_feature (408): n equals a,t,g, or c
  misc_feature (409): n equals a,t,g, or c
  misc_feature (410): n equals a,t,g, or c
  misc_feature (411): n equals a,t,g, or c
  misc_feature (412): n equals a,t,g, or c
  misc_feature (413): n equals a,t,g, or c
  misc_feature (414): n equals a,t,g, or c
  misc_feature (415): n equals a,t,g, or c
  misc_feature (416): n equals a,t,g, or c
  misc_feature (417): n equals a,t,g, or c
  misc_feature (418): n equals a,t,g, or c
  misc_feature (419): n equals a,t,g, or c
  misc_feature (420): n equals a,t,g, or c
  misc_feature (421): n equals a,t,g, or c
  misc_feature (422): n equals a,t,g, or c
  misc_feature (423): n equals a,t,g, or c
  misc_feature (424): n equals a,t,g, or c
  misc_feature (425): n equals a,t,g, or c
  misc_feature (426): n equals a,t,g, or c
  misc_feature (427): n equals a,t,g, or c
  misc_feature (428): n equals a,t,g, or c
  misc_feature (429): n equals a,t,g, or c
  misc_feature (430): n equals a,t,g, or c
  misc_feature (431): n equals a,t,g, or c
  misc_feature (432): n equals a,t,g, or c
  misc_feature (433): n equals a,t,g, or c
  misc_feature (434): n equals a,t,g, or c
  misc_feature (435): n equals a,t,g, or c
  misc_feature (436): n equals a,t,g, or c
  misc_feature (437): n equals a,t,g, or c
  misc_feature (438): n equals a,t,g, or c
  misc_feature (439): n equals a,t,g, or c
  misc_feature (440): n equals a,t,g, or c
  misc_feature (441): n equals a,t,g, or c
  misc_feature (442): n equals a,t,g, or c
  misc_feature (443): n equals a,t,g, or c
  misc_feature (444): n equals a,t,g, or c
  misc_feature (445): n equals a,t,g, or c
  misc_feature (446): n equals a,t,g, or c
  misc_feature (447): n equals a,t,g, or c
  misc_feature (448): n equals a,t,g, or c
  misc_feature (449): n equals a,t,g, or c
  misc_feature (450): n equals a,t,g, or c
  misc_feature (451): n equals a,t,g, or c
  misc_feature (452): n equals a,t,g, or c
  misc_feature (453): n equals a,t,g, or c
  misc_feature (454): n equals a,t,g, or c
  misc_feature (455): n equals a,t,g, or c
  misc_feature (456): n equals a,t,g, or c
  misc_feature (457): n equals a,t,g, or c
  misc_feature (458): n equals a,t,g, or c
  misc_feature (459): n equals a,t,g, or c
  misc_feature (460): n equals a,t,g, or c
  misc_feature (461): n equals a,t,g, or c
  misc_feature (462): n equals a,t,g, or c
  misc_feature (463): n equals a,t,g, or c
  misc_feature (464): n equals a,t,g, or c
  misc_feature (465): n equals a,t,g, or c
  misc_feature (466): n equals a,t,g, or c
  misc_feature (467): n equals a,t,g, or c
  misc_feature (468): n equals a,t,g, or c
  misc_feature (469): n equals a,t,g, or c
  misc_feature (470): n equals a,t,g, or c
  misc_feature (471): n equals a,t,g, or c
  misc_feature (472): n equals a,t,g, or c
  misc_feature (473): n equals a,t,g, or c
  misc_feature (474): n equals a,t,g, or c
  misc_feature (475): n equals a,t,g, or c
  misc_feature (476): n equals a,t,g, or c
  misc_feature (477): n equals a,t,g, or c
  misc_feature (478): n equals a,t,g, or c
  misc_feature (479): n equals a,t,g, or c
  misc_feature (480): n equals a,t,g, or c
  misc_feature (481): n equals a,t,g, or c
  misc_feature (482): n equals a,t,g, or c
  misc_feature (483): n equals a,t,g, or c
  misc_feature (484): n equals a,t,g, or c
  misc_feature (485): n equals a,t,g, or c
  misc_feature (486): n equals a,t,g, or c
  misc_feature (487): n equals a,t,g, or c
  misc_feature (488): n equals a,t,g, or c
  misc_feature (489): n equals a,t,g, or c
  misc_feature (490): n equals a,t,g, or c
  misc_feature (491): n equals a,t,g, or c
  misc_feature (492): n equals a,t,g, or c
  misc_feature (493): n equals a,t,g, or c
  misc_feature (494): n equals a,t,g, or c
  misc_feature (495): n equals a,t,g, or c
  misc_feature (496): n equals a,t,g, or c
  misc_feature (497): n equals a,t,g, or c
  misc_feature (498): n equals a,t,g, or c
  misc_feature (499): n equals a,t,g, or c
  misc_feature (500): n equals a,t,g, or c
  misc_feature (501): n equals a,t,g, or c
  misc_feature (502): n equals a,t,g, or c
  misc_feature (503): n equals a,t,g, or c
  misc_feature (504): n equals a,t,g, or c
  misc_feature (505): n equals a,t,g, or c
  misc_feature (506): n equals a,t,g, or c
  misc_feature (507): n equals a,t,g, or c
  misc_feature (508): n equals a,t,g, or c
  misc_feature (509): n equals a,t,g, or c
  misc_feature (510): n equals a,t,g, or c
  misc_feature (511): n equals a,t,g, or c
  misc_feature (512): n equals a,t,g, or c
  misc_feature (513): n equals a,t,g, or c
  misc_feature (514): n equals a,t,g, or c
  misc_feature (515): n equals a,t,g, or c
  misc_feature (516): n equals a,t,g, or c
  misc_feature (517): n equals a,t,g, or c
  misc_feature (518): n equals a,t,g, or c
  misc_feature (519): n equals a,t,g, or c
  misc_feature (520): n equals a,t,g, or c
  misc_feature (521): n equals a,t,g, or c
  misc_feature (522): n equals a,t,g, or c
  misc_feature (523): n equals a,t,g, or c
  misc_feature (524): n equals a,t,g, or c
  misc_feature (525): n equals a,t,g, or c
  misc_feature (526): n equals a,t,g, or c
  misc_feature (527): n equals a,t,g, or c
  misc_feature (528): n equals a,t,g, or c
  misc_feature (529): n equals a,t,g, or c
  misc_feature (530): n equals a,t,g, or c
  misc_feature (531): n equals a,t,g, or c
  misc_feature (532): n equals a,t,g, or c
  misc_feature (533): n equals a,t,g, or c
  misc_feature (534): n equals a,t,g, or c
  misc_feature (535): n equals a,t,g, or c
  misc_feature (536): n equals a,t,g, or c
  misc_feature (537): n equals a,t,g, or c
  misc_feature (538): n equals a,t,g, or c
  misc_feature (539): n equals a,t,g, or c
  misc_feature (540): n equals a,t,g, or c
  misc_feature (541): n equals a,t,g, or c
  misc_feature (542): n equals a,t,g, or c
  misc_feature (543): n equals a,t,g, or c
  misc_feature (544): n equals a,t,g, or c
  misc_feature (545): n equals a,t,g, or c
  misc_feature (546): n equals a,t,g, or c
  misc_feature (547): n equals a,t,g, or c
  misc_feature (548): n equals a,t,g, or c
  misc_feature (549): n equals a,t,g, or c
  misc_feature (550): n equals a,t,g, or c
  misc_feature (551): n equals a,t,g, or c
  misc_feature (552): n equals a,t,g, or c
  misc_feature (553): n equals a,t,g, or c
  misc_feature (554): n equals a,t,g, or c
  misc_feature (555): n equals a,t,g, or c
  misc_feature (556): n equals a,t,g, or c
  misc_feature (557): n equals a,t,g, or c
  misc_feature (558): n equals a,t,g, or c
  misc_feature (559): n equals a,t,g, or c
  misc_feature (560): n equals a,t,g, or c
  misc_feature (561): n equals a,t,g, or c
  misc_feature (562): n equals a,t,g, or c
  misc_feature (563): n equals a,t,g, or c
  misc_feature (564): n equals a,t,g, or c
  misc_feature (565): n equals a,t,g, or c
  misc_feature (566): n equals a,t,g, or c
  misc_feature (567): n equals a,t,g, or c
  misc_feature (568): n equals a,t,g, or c
  misc_feature (569): n equals a,t,g, or c
  misc_feature (570): n equals a,t,g, or c
  misc_feature (571): n equals a,t,g, or c
  misc_feature (572): n equals a,t,g, or c
  misc_feature (573): n equals a,t,g, or c
  misc_feature (574): n equals a,t,g, or c
  misc_feature (575): n equals a,t,g, or c
  misc_feature (576): n equals a,t,g, or c
  misc_feature (577): n equals a,t,g, or c
  misc_feature (578): n equals a,t,g, or c
  misc_feature (579): n equals a,t,g, or c
  misc_feature (580): n equals a,t,g, or c
  misc_feature (581): n equals a,t,g, or c
  misc_feature (582): n equals a,t,g, or c
  misc_feature (583): n equals a,t,g, or c
  misc_feature (584): n equals a,t,g, or c
  misc_feature (585): n equals a,t,g, or c
  misc_feature (586): n equals a,t,g, or c
  misc_feature (587): n equals a,t,g, or c
  misc_feature (588): n equals a,t,g, or c
  misc_feature (589): n equals a,t,g, or c
  misc_feature (590): n equals a,t,g, or c
  misc_feature (591): n equals a,t,g, or c
  misc_feature (592): n equals a,t,g, or c
  misc_feature (593): n equals a,t,g, or c
  misc_feature (594): n equals a,t,g, or c
  misc_feature (595): n equals a,t,g, or c
  misc_feature (596): n equals a,t,g, or c
  misc_feature (597): n equals a,t,g, or c
  misc_feature (598): n equals a,t,g, or c
  misc_feature (599): n equals a,t,g, or c
  misc_feature (600): n equals a,t,g, or c
  misc_feature (601): n equals a,t,g, or c
  misc_feature (602): n equals a,t,g, or c
  misc_feature (603): n equals a,t,g, or c
  misc_feature (604): n equals a,t,g, or c
  misc_feature (605): n equals a,t,g, or c
  misc_feature (606): n equals a,t,g, or c
  misc_feature (607): n equals a,t,g, or c
  misc_feature (608): n equals a,t,g, or c
  misc_feature (609): n equals a,t,g, or c
  misc_feature (610): n equals a,t,g, or c
  misc_feature (611): n equals a,t,g, or c
  misc_feature (612): n equals a,t,g, or c
  misc_feature (613): n equals a,t,g, or c
  misc_feature (614): n equals a,t,g, or c
  misc_feature (615): n equals a,t,g, or c
  misc_feature (616): n equals a,t,g, or c
  misc_feature (617): n equals a,t,g, or c
  misc_feature (618): n equals a,t,g, or c
  misc_feature (619): n equals a,t,g, or c
  misc_feature (620): n equals a,t,g, or c
  misc_feature (621): n equals a,t,g, or c
  misc_feature (622): n equals a,t,g, or c
  misc_feature (623): n equals a,t,g, or c
  misc_feature (624): n equals a,t,g, or c
  misc_feature (625): n equals a,t,g, or c
  misc_feature (626): n equals a,t,g, or c
  misc_feature (627): n equals a,t,g, or c
  misc_feature (628): n equals a,t,g, or c
  misc_feature (629): n equals a,t,g, or c
  misc_feature (630): n equals a,t,g, or c
  misc_feature (631): n equals a,t,g, or c
  misc_feature (632): n equals a,t,g, or c
  misc_feature (633): n equals a,t,g, or c
  misc_feature (634): n equals a,t,g, or c
  misc_feature (635): n equals a,t,g, or c
  misc_feature (636): n equals a,t,g, or c
  misc_feature (637): n equals a,t,g, or c
  misc_feature (638): n equals a,t,g, or c
  misc_feature (639): n equals a,t,g, or c
  misc_feature (640): n equals a,t,g, or c
  misc_feature (641): n equals a,t,g, or c
  misc_feature (642): n equals a,t,g, or c
  misc_feature (643): n equals a,t,g, or c
  misc_feature (644): n equals a,t,g, or c
  misc_feature (645): n equals a,t,g, or c
  misc_feature (646): n equals a,t,g, or c
  misc_feature (647): n equals a,t,g, or c
  misc_feature (648): n equals a,t,g, or c
  misc_feature (649): n equals a,t,g, or c
  misc_feature (650): n equals a,t,g, or c
  misc_feature (651): n equals a,t,g, or c
  misc_feature (652): n equals a,t,g, or c
  misc_feature (653): n equals a,t,g, or c
  misc_feature (654): n equals a,t,g, or c
  misc_feature (655): n equals a,t,g, or c
  misc_feature (656): n equals a,t,g, or c
  misc_feature (657): n equals a,t,g, or c
  misc_feature (658): n equals a,t,g, or c
  misc_feature (659): n equals a,t,g, or c
  misc_feature (660): n equals a,t,g, or c
  misc_feature (661): n equals a,t,g, or c
  misc_feature (662): n equals a,t,g, or c
  misc_feature (663): n equals a,t,g, or c
  misc_feature (664): n equals a,t,g, or c
  misc_feature (665): n equals a,t,g, or c
  misc_feature (666): n equals a,t,g, or c
  misc_feature (667): n equals a,t,g, or c
  misc_feature (668): n equals a,t,g, or c
  misc_feature (669): n equals a,t,g, or c
  misc_feature (670): n equals a,t,g, or c
  misc_feature (671): n equals a,t,g, or c
  misc_feature (672): n equals a,t,g, or c
  misc_feature (673): n equals a,t,g, or c
  misc_feature (674): n equals a,t,g, or c
  misc_feature (675): n equals a,t,g, or c
  misc_feature (676): n equals a,t,g, or c
  misc_feature (677): n equals a,t,g, or c
  misc_feature (678): n equals a,t,g, or c
  misc_feature (679): n equals a,t,g, or c
  misc_feature (680): n equals a,t,g, or c
  misc_feature (681): n equals a,t,g, or c
  misc_feature (682): n equals a,t,g, or c
  misc_feature (683): n equals a,t,g, or c
  misc_feature (684): n equals a,t,g, or c
  misc_feature (685): n equals a,t,g, or c
  misc_feature (686): n equals a,t,g, or c
  misc_feature (687): n equals a,t,g, or c
  misc_feature (688): n equals a,t,g, or c
  misc_feature (689): n equals a,t,g, or c
  misc_feature (690): n equals a,t,g, or c
  misc_feature (691): n equals a,t,g, or c
  misc_feature (692): n equals a,t,g, or c
  misc_feature (693): n equals a,t,g, or c
  misc_feature (694): n equals a,t,g, or c
  misc_feature (695): n equals a,t,g, or c
  misc_feature (696): n equals a,t,g, or c
  misc_feature (697): n equals a,t,g, or c
  misc_feature (698): n equals a,t,g, or c
  misc_feature (699): n equals a,t,g, or c
  misc_feature (700): n equals a,t,g, or c
  misc_feature (701): n equals a,t,g, or c
  misc_feature (702): n equals a,t,g, or c
  misc_feature (703): n equals a,t,g, or c
  misc_feature (704): n equals a,t,g, or c
  misc_feature (705): n equals a,t,g, or c
  misc_feature (706): n equals a,t,g, or c
  misc_feature (707): n equals a,t,g, or c
  misc_feature (708): n equals a,t,g, or c
  misc_feature (709): n equals a,t,g, or c
  misc_feature (710): n equals a,t,g, or c
  misc_feature (711): n equals a,t,g, or c
  misc_feature (712): n equals a,t,g, or c
  misc_feature (713): n equals a,t,g, or c
  misc_feature (714): n equals a,t,g, or c
  misc_feature (715): n equals a,t,g, or c
  misc_feature (716): n equals a,t,g, or c
  misc_feature (717): n equals a,t,g, or c
  misc_feature (718): n equals a,t,g, or c
  misc_feature (719): n equals a,t,g, or c
  misc_feature (720): n equals a,t,g, or c
  misc_feature (721): n equals a,t,g, or c
  misc_feature (722): n equals a,t,g, or c
  misc_feature (723): n equals a,t,g, or c
  misc_feature (724): n equals a,t,g, or c
  misc_feature (725): n equals a,t,g, or c
  misc_feature (726): n equals a,t,g, or c
  misc_feature (727): n equals a,t,g, or c
  misc_feature (728): n equals a,t,g, or c
  misc_feature (729): n equals a,t,g, or c
  misc_feature (730): n equals a,t,g, or c
  misc_feature (731): n equals a,t,g, or c
  misc_feature (732): n equals a,t,g, or c
  misc_feature (733): n equals a,t,g, or c
  misc_feature (734): n equals a,t,g, or c
  misc_feature (735): n equals a,t,g, or c
  misc_feature (736): n equals a,t,g, or c
  misc_feature (737): n equals a,t,g, or c
  misc_feature (738): n equals a,t,g, or c
  misc_feature (739): n equals a,t,g, or c
  misc_feature (740): n equals a,t,g, or c
  misc_feature (741): n equals a,t,g, or c
  misc_feature (742): n equals a,t,g, or c
  misc_feature (743): n equals a,t,g, or c
  misc_feature (744): n equals a,t,g, or c
  misc_feature (745): n equals a,t,g, or c
  misc_feature (746): n equals a,t,g, or c
  misc_feature (747): n equals a,t,g, or c
  misc_feature (748): n equals a,t,g, or c
  misc_feature (749): n equals a,t,g, or c
  misc_feature (750): n equals a,t,g, or c
  misc_feature (751): n equals a,t,g, or c
  misc_feature (752): n equals a,t,g, or c
  misc_feature (753): n equals a,t,g, or c
  misc_feature (754): n equals a,t,g, or c
  misc_feature (755): n equals a,t,g, or c
  misc_feature (756): n equals a,t,g, or c
  misc_feature (757): n equals a,t,g, or c
  misc_feature (758): n equals a,t,g, or c
  misc_feature (759): n equals a,t,g, or c
  misc_feature (760): n equals a,t,g, or c
  misc_feature (761): n equals a,t,g, or c
  misc_feature (762): n equals a,t,g, or c
  misc_feature (763): n equals a,t,g, or c
  misc_feature (764): n equals a,t,g, or c
  misc_feature (765): n equals a,t,g, or c
  misc_feature (766): n equals a,t,g, or c
  misc_feature (767): n equals a,t,g, or c
  misc_feature (768): n equals a,t,g, or c
  misc_feature (769): n equals a,t,g, or c
  misc_feature (770): n equals a,t,g, or c
  misc_feature (771): n equals a,t,g, or c
  misc_feature (772): n equals a,t,g, or c
  misc_feature (773): n equals a,t,g, or c
  misc_feature (774): n equals a,t,g, or c
  misc_feature (775): n equals a,t,g, or c
  misc_feature (776): n equals a,t,g, or c
  misc_feature (777): n equals a,t,g, or c
  misc_feature (778): n equals a,t,g, or c
  misc_feature (779): n equals a,t,g, or c
  misc_feature (780): n equals a,t,g, or c
  misc_feature (781): n equals a,t,g, or c
  misc_feature (782): n equals a,t,g, or c
  misc_feature (783): n equals a,t,g, or c
  misc_feature (784): n equals a,t,g, or c
  misc_feature (785): n equals a,t,g, or c
  misc_feature (786): n equals a,t,g, or c
  misc_feature (787): n equals a,t,g, or c
  misc_feature (788): n equals a,t,g, or c
  misc_feature (789): n equals a,t,g, or c
  misc_feature (790): n equals a,t,g, or c
  misc_feature (791): n equals a,t,g, or c
  misc_feature (792): n equals a,t,g, or c
  misc_feature (793): n equals a,t,g, or c
  misc_feature (794): n equals a,t,g, or c
  misc_feature (795): n equals a,t,g, or c
  misc_feature (796): n equals a,t,g, or c
  misc_feature (797): n equals a,t,g, or c
  misc_feature (798): n equals a,t,g, or c
  misc_feature (799): n equals a,t,g, or c
  misc_feature (800): n equals a,t,g, or c
  misc_feature (801): n equals a,t,g, or c
  misc_feature (802): n equals a,t,g, or c
  misc_feature (803): n equals a,t,g, or c
  misc_feature (804): n equals a,t,g, or c
  misc_feature (805): n equals a,t,g, or c
  misc_feature (806): n equals a,t,g, or c
  misc_feature (807): n equals a,t,g, or c
  misc_feature (808): n equals a,t,g, or c
  misc_feature (809): n equals a,t,g, or c
  misc_feature (810): n equals a,t,g, or c
  misc_feature (811): n equals a,t,g, or c
  misc_feature (812): n equals a,t,g, or c
  misc_feature (813): n equals a,t,g, or c
  misc_feature (814): n equals a,t,g, or c
  misc_feature (815): n equals a,t,g, or c
  misc_feature (816): n equals a,t,g, or c
  misc_feature (817): n equals a,t,g, or c
  misc_feature (818): n equals a,t,g, or c
  misc_feature (819): n equals a,t,g, or c
  misc_feature (820): n equals a,t,g, or c
  misc_feature (821): n equals a,t,g, or c
  misc_feature (822): n equals a,t,g, or c
  misc_feature (823): n equals a,t,g, or c
  misc_feature (824): n equals a,t,g, or c
  misc_feature (825): n equals a,t,g, or c
  misc_feature (826): n equals a,t,g, or c
  misc_feature (827): n equals a,t,g, or c
  misc_feature (828): n equals a,t,g, or c
  misc_feature (829): n equals a,t,g, or c
  misc_feature (830): n equals a,t,g, or c
  misc_feature (831): n equals a,t,g, or c
  misc_feature (832): n equals a,t,g, or c
  misc_feature (833): n equals a,t,g, or c
  misc_feature (834): n equals a,t,g, or c
  misc_feature (835): n equals a,t,g, or c
  misc_feature (836): n equals a,t,g, or c
  misc_feature (837): n equals a,t,g, or c
  misc_feature (838): n equals a,t,g, or c
  misc_feature (839): n equals a,t,g, or c
  misc_feature (840): n equals a,t,g, or c
  misc_feature (841): n equals a,t,g, or c
  misc_feature (842): n equals a,t,g, or c
  misc_feature (843): n equals a,t,g, or c
  misc_feature (844): n equals a,t,g, or c
  misc_feature (845): n equals a,t,g, or c
  misc_feature (846): n equals a,t,g, or c
  misc_feature (847): n equals a,t,g, or c
  misc_feature (848): n equals a,t,g, or c
  misc_feature (849): n equals a,t,g, or c
  misc_feature (850): n equals a,t,g, or c
  misc_feature (851): n equals a,t,g, or c
  misc_feature (852): n equals a,t,g, or c
  misc_feature (853): n equals a,t,g, or c
  misc_feature (854): n equals a,t,g, or c
  misc_feature (855): n equals a,t,g, or c
  misc_feature (856): n equals a,t,g, or c
  misc_feature (857): n equals a,t,g, or c
  misc_feature (858): n equals a,t,g, or c
  misc_feature (859): n equals a,t,g, or c
  misc_feature (860): n equals a,t,g, or c
  misc_feature (861): n equals a,t,g, or c
  misc_feature (862): n equals a,t,g, or c
  misc_feature (863): n equals a,t,g, or c
  misc_feature (864): n equals a,t,g, or c
  misc_feature (865): n equals a,t,g, or c
  misc_feature (866): n equals a,t,g, or c
  misc_feature (867): n equals a,t,g, or c
  misc_feature (868): n equals a,t,g, or c
  misc_feature (869): n equals a,t,g, or c
  misc_feature (870): n equals a,t,g, or c
  misc_feature (871): n equals a,t,g, or c
  misc_feature (872): n equals a,t,g, or c
  misc_feature (873): n equals a,t,g, or c
  misc_feature (874): n equals a,t,g, or c
  misc_feature (875): n equals a,t,g, or c
  misc_feature (876): n equals a,t,g, or c
  misc_feature (877): n equals a,t,g, or c
  misc_feature (878): n equals a,t,g, or c
  misc_feature (879): n equals a,t,g, or c
  misc_feature (880): n equals a,t,g, or c
  misc_feature (881): n equals a,t,g, or c
  misc_feature (882): n equals a,t,g, or c
  misc_feature (883): n equals a,t,g, or c
  misc_feature (884): n equals a,t,g, or c
  misc_feature (885): n equals a,t,g, or c
  misc_feature (886): n equals a,t,g, or c
  misc_feature (887): n equals a,t,g, or c
  misc_feature (888): n equals a,t,g, or c
  misc_feature (889): n equals a,t,g, or c
  misc_feature (890): n equals a,t,g, or c
  misc_feature (891): n equals a,t,g, or c
  misc_feature (892): n equals a,t,g, or c
  misc_feature (893): n equals a,t,g, or c
  misc_feature (894): n equals a,t,g, or c
  misc_feature (895): n equals a,t,g, or c
  misc_feature (896): n equals a,t,g, or c
  misc_feature (897): n equals a,t,g, or c
  misc_feature (898): n equals a,t,g, or c
  misc_feature (899): n equals a,t,g, or c
  misc_feature (900): n equals a,t,g, or c
  misc_feature (901): n equals a,t,g, or c
  misc_feature (902): n equals a,t,g, or c
  misc_feature (903): n equals a,t,g, or c
  misc_feature (904): n equals a,t,g, or c
  misc_feature (905): n equals a,t,g, or c
  misc_feature (906): n equals a,t,g, or c
  misc_feature (907): n equals a,t,g, or c
  misc_feature (908): n equals a,t,g, or c
  misc_feature (909): n equals a,t,g, or c
  misc_feature (910): n equals a,t,g, or c
  misc_feature (911): n equals a,t,g, or c
  misc_feature (912): n equals a,t,g, or c
  misc_feature (913): n equals a,t,g, or c
  misc_feature (914): n equals a,t,g, or c
  misc_feature (915): n equals a,t,g, or c
  misc_feature (916): n equals a,t,g, or c
  misc_feature (917): n equals a,t,g, or c
  misc_feature (918): n equals a,t,g, or c
  misc_feature (919): n equals a,t,g, or c
  misc_feature (920): n equals a,t,g, or c
  misc_feature (921): n equals a,t,g, or c
  misc_feature (922): n equals a,t,g, or c
  misc_feature (923): n equals a,t,g, or c
  misc_feature (924): n equals a,t,g, or c
  misc_feature (925): n equals a,t,g, or c
  misc_feature (926): n equals a,t,g, or c
  misc_feature (927): n equals a,t,g, or c
  misc_feature (928): n equals a,t,g, or c
  misc_feature (929): n equals a,t,g, or c
  misc_feature (930): n equals a,t,g, or c
  misc_feature (931): n equals a,t,g, or c
  misc_feature (932): n equals a,t,g, or c
  misc_feature (933): n equals a,t,g, or c
  misc_feature (934): n equals a,t,g, or c
  misc_feature (935): n equals a,t,g, or c
  misc_feature (936): n equals a,t,g, or c
  misc_feature (937): n equals a,t,g, or c
  misc_feature (938): n equals a,t,g, or c
  misc_feature (939): n equals a,t,g, or c
  misc_feature (940): n equals a,t,g, or c
  misc_feature (941): n equals a,t,g, or c
  misc_feature (942): n equals a,t,g, or c
  misc_feature (943): n equals a,t,g, or c
  misc_feature (944): n equals a,t,g, or c
  misc_feature (945): n equals a,t,g, or c
  misc_feature (946): n equals a,t,g, or c
  misc_feature (947): n equals a,t,g, or c
  misc_feature (948): n equals a,t,g, or c
  misc_feature (949): n equals a,t,g, or c
  misc_feature (950): n equals a,t,g, or c
  misc_feature (951): n equals a,t,g, or c
  misc_feature (952): n equals a,t,g, or c
  misc_feature (953): n equals a,t,g, or c
  misc_feature (954): n equals a,t,g, or c
  misc_feature (955): n equals a,t,g, or c
  misc_feature (956): n equals a,t,g, or c
  misc_feature (957): n equals a,t,g, or c
  misc_feature (958): n equals a,t,g, or c
  misc_feature (959): n equals a,t,g, or c
  misc_feature (960): n equals a,t,g, or c
  misc_feature (961): n equals a,t,g, or c
  misc_feature (962): n equals a,t,g, or c
  misc_feature (963): n equals a,t,g, or c
  misc_feature (964): n equals a,t,g, or c
  misc_feature (965): n equals a,t,g, or c
  misc_feature (966): n equals a,t,g, or c
  misc_feature (967): n equals a,t,g, or c
  misc_feature (968): n equals a,t,g, or c
  misc_feature (969): n equals a,t,g, or c
  misc_feature (970): n equals a,t,g, or c
  misc_feature (971): n equals a,t,g, or c
  misc_feature (972): n equals a,t,g, or c
  misc_feature (973): n equals a,t,g, or c
  misc_feature (974): n equals a,t,g, or c
  misc_feature (975): n equals a,t,g, or c
  misc_feature (976): n equals a,t,g, or c
  misc_feature (977): n equals a,t,g, or c
  misc_feature (978): n equals a,t,g, or c
  misc_feature (979): n equals a,t,g, or c
  misc_feature (980): n equals a,t,g, or c
  misc_feature (981): n equals a,t,g, or c
  misc_feature (982): n equals a,t,g, or c
  misc_feature (983): n equals a,t,g, or c
  misc_feature (984): n equals a,t,g, or c
  misc_feature (985): n equals a,t,g, or c
  misc_feature (986): n equals a,t,g, or c
  misc_feature (987): n equals a,t,g, or c
  misc_feature (988): n equals a,t,g, or c
  misc_feature (989): n equals a,t,g, or c
  misc_feature (990): n equals a,t,g, or c
  misc_feature (991): n equals a,t,g, or c
  misc_feature (992): n equals a,t,g, or c
  misc_feature (993): n equals a,t,g, or c
  misc_feature (994): n equals a,t,g, or c
  misc_feature (995): n equals a,t,g, or c
  misc_feature (996): n equals a,t,g, or c
  misc_feature (997): n equals a,t,g, or c
  misc_feature (998): n equals a,t,g, or c
  misc_feature (999): n equals a,t,g, or c
  misc_feature (1000): n equals a,t,g, or c
  misc_feature (1001): n equals a,t,g, or c
  misc_feature (1002): n equals a,t,g, or c
  misc_feature (1003): n equals a,t,g, or c
  misc_feature (1004): n equals a,t,g, or c
  misc_feature (1005): n equals a,t,g, or c
  misc_feature (1006): n equals a,t,g, or c
  misc_feature (1007): n equals a,t,g, or c
  misc_feature (1008): n equals a,t,g, or c
  misc_feature (1009): n equals a,t,g, or c
  misc_feature (1010): n equals a,t,g, or c
  misc_feature (1011): n equals a,t,g, or c
  misc_feature (1012): n equals a,t,g, or c
  misc_feature (1013): n equals a,t,g, or c
  misc_feature (1014): n equals a,t,g, or c
  misc_feature (1015): n equals a,t,g, or c
  misc_feature (1016): n equals a,t,g, or c
  misc_feature (1017): n equals a,t,g, or c
  misc_feature (1018): n equals a,t,g, or c
  misc_feature (1019): n equals a,t,g, or c
  misc_feature (1020): n equals a,t,g, or c
  misc_feature (1021): n equals a,t,g, or c
gtttgtttttttttttttttttttttttttttttgagatagactttcactcttgtcacccaggttggagtgcaatggcgcaatctcggctcactgcaacctccgcctcctgggttcaagcgattctcctgcctcagcctcctgagtagctgggattataggcacccaccaccacacccagctaatttttgtatttttagtacagatggggtttcaccattttggtcaggctggtcttgaactcctgacctcaggtgatccacccacctcgtcctcccaaagtactgggattacagatgtgagccaccgcacccagcctctgtttacacactaccacataggnnnnnnnnnnnnnnnnnnnnnnnnnnnnnnnnnnnnnnnnnnnnnnnnnnnnnnnnnnnnnnnnnnnnnnnnnnnnnnnnnnnnnnnnnnnnnnnnnnnnnnnnnnnnnnnnnnnnnnnnnnnnnnnnnnnnnnnnnnnnnnnnnnnnnnnnnnnnnnnnnnnnnnnnnnnnnnnnnnnnnnnnnnnnnnnnnnnnnnnnnnnnnnnnnnnnnnnnnnnnnnnnnnnnnnnnnnnnnnnnnnnnnnnnnnnnnnnnnnnnnnnnnnnnnnnnnnnnnnnnnnnnnnnnnnnnnnnnnnnnnnnnnnnnnnnnnnnnnnnnnnnnnnnnnnnnnnnnnnnnnnnnnnnnnnnnnnnnnnnnnnnnnnnnnnnnnnnnnnnnnnnnnnnnnnnnnnnnnnnnnnnnnnnnnnnnnnnnnnnnnnnnnnnnnnnnnnnnnnnnnnnnnnnnnnnnnnnnnnnnnnnnnnnnnnnnnnnnnnnnnnnnnnnnnnnnnnnnnnnnnnnnnnnnnnnnnnnnnnnnnnnnnnnnnnnnnnnnnnnnnnnnnnnnnnnnnnnnnnnnnnnnnnnnnnnnnnnnnnnnnnnnnnnnnnnnnnnnnnnnnnnnnnnnnnnnnnnnnnnnnnnnnnnnnnnnnnnnnnnnnnnnnnnnnnnnnnnnnnnnnnnnnnnnnnnnnnnnnnnntgtttagctcctttagataaaccataactaggctgggcgtggtggctcacacctgtaatcccagcactttgggaggccgaggcgggcagatcacctgaggtcaggagttgaagagtagcctgaccaatatggtgaaaccctgtccctaccaaaaatacaaaaaaa

SEQ ID NO: 259 - DNA, 5775 bp, Homo sapiens
gccacgcgatccactgggcttctgggcacagaagtgcctcaacaggcacaggcaggctccccacagccacaaggaaccctgctgccaaggaagcagctcctgttggggtcatcagatttttaatctggctcagcaaagccatggctgtccagccttaaaaaaatgggtgatgtgggagaaatggagggtgtgtgaagagcacagctgggcctcgagaactcagggccagccttcccagcttgggtcctgtttcggagcccaggccttgcttccccttagccgccccagccagattcttttgcgccccctgctggcacacacaaagacagacccaggagcgcacatgtgaacgtgcgcatgcttgctgccagttacccagttcatgaacacgtgaagccttgacttcaggttaagtaataaaaatttattgagaattcctgggttggtgtttatctcctcccagccttgagggagggaacaacactgtaggaaatcactgagaaatcacgcactgtccccaacagccccagttaacacagggaggaggaaagtaattccccagaaaaggggctagtcttcagtcttccttaatccaagaggggttcagggaaccggtgtgggggaccatcgcatgatactggggcggggtagggctgtgctggacccctggctggctcctcaaaaactggagaagcagatccacttcctctgggggtggagttcttggtgactaggctcatttcttacccttgatgaggctgtcactgtaggaaaaaaaagatagataatgacattattaggggacataaatgtgagaggcaggacactctaggccattccctctacgaccctcctaccctgattgagggtttgtcttcggggaggtgggaaagggggtagggtaggaggcgggtactggagaaggtggcctgcaggaccccacagaagcaacaacagcttaccttcccctgtggtgccagatcgccagatgaacaagaaacagagaagagaaatgcacatgttaattgacagcttcaggccccactcagctttgaaccctcctttgctcccaagagaaaagataaacagggttgacagccaggaatctcaggctcatgaaaggaggaggcatgttctcatggccactgctatttctcatctcctttcctaacatccctccattcaccagaggagtttgagggctcttgagtaagaaaactgagtatcatctttcatcactttttggttagatgaaaactttataattaaagtgctttttatgtgaataatcctatttgatctcataaaatcaatcctatgagatgcaagatagaaactgtcaaccacccccttttctaattttggttcaatgtctctgagccatatgaatagctgtagcaggctccagagcccaaacaaccagactcaggtcccacgttcttggtgataccccacagtgtggccacatctctcacctggtgaaactttcatcctgtaggttcagcacaaggttgtcagctgtgagatagatacgattctgtgatgtggcgatctacagggcaggaaataagacagatgcttgcattaagcaaagacctcaattccgacccctgcaattcagcagctacttaacatggaacacatgcagattagggcaggggtgcagcaatgagtaacacatggtttctgctcgcacttagggatccagagcgctgagcagcagctatgattagaacaaaaggtcagggaacccagaggaatcattcttgacaggaggagtatcggagaagccaattttttatttatttatttttgagacggagtcttgctctgttgctcaggctggagtgcagtggcatgatctcagctcactgcaacttccgcctcctgggttcaagtgattctcctgcctcagcctcctgcgtagctgggaatatagctaaacgccaccacagcgggctcattatcttttgtatttttagtagagatggggtttcaccatgttggccaggctggtctcgaactcctgacctcaggtgatccacccaccttggcctcccaaagtgcggggattacatgcgtgagccaccgcgccggccagagaagccaatctgagtagaaaccggaacaagcaaggttcgaattccctcacctcaatgtgccttaactgaaagcactttctcaaggcagccccatcagagacgctgggctgacacactcaccgtcttggagatattctgggctgctcgaatcttgcgaagtttgatgtagccagggttcttgctcagtgcttctccaaggtgaggagggttaaggtacacgcaagggcaggtctcaatccctggccctgtccttaccacactcccttgctccagtcctcctctgggctgtcagatccaaggttgcgctcaggtggcttgtgcccagccctaccgtggaccccacctgtgggcctccctgcaggctgctgccaggaactaggggcagcaccagaaatgaaggcaaggccaccaatgctattgatctggccttacagtggggagtcatggctcaggtactaccactaagatttcagatctcatctgtagtccccacccccaacaaggagccaagggccagagagcacggagtcgcattcgccttagtctcatcagcctgcccatgaaggagaatggggaactcaggtgccctaggggctgggctgagatctctccagcagaaggatatcatcttggcagcctcggcctcaccctcggcctgcacaattttctgccgctgttcctgctttgctttttctaccaagaattgggcccgctgggcctcctgctgggctgtggtgggagagagtcagggagaccctgtcctgggtcaggagccccacccatggagtctttcctcctcctgcatctcagaagccctcaccccacggctcttgcgactcacccacttgtttggcttctacagcagctgtgtactctcggctaaagctcagctctgtgatggccacatcatccaggatgaggctgaagtccttggccctctctgtcagctcccggcggatcaacagggatacctgagggcaggggtgaagaggggaagggaggggtggtttgaggggactggggagctgaaaggaaggttgcgacccctaacccttcactctcaatacaacatgcactgccttagcttcctgtcaggcaaacctgtaacataagcctctctgctcgaagaggtgcaggaaaagccaagacttggccattttcctctgtgcttcctaacaccgagtgctatcgagttctaatgctggctctccttatttcacagtggcaattagcacagcttttaggtggaaatggcactagggtgacaatgcttttctaataagctgcctttcctaattcccaatactctgggcctaggaaggaaaggctgacaccacgcagatggtggtgggagtcagacctgggcccgctgggtgatcagctgtgaggcattgaacttggccaccacactcttgagcacctcgttgacaatggacggcaacactcgttcctcgtagtccagccctaggcgctggtacatgctaggaagctcctgagcattgggtcgagacaacactcgcagggagatattcaccatctgtaggtctgagattgaggtcagcagtggctggtcaaggccaaacaccctttcccaagcattttctccttcatgttcctccctgtatgccctgtgcaatggtgtacagcctggcactaccctggggggaggagagttaatcaggctgacaaggaagacaagacgcagcacagctgaaatgcaccctcacccactgtgaagccttgaactgcaaaccccgtcaccagcagagctgactactctttccccctctgtactctgtgcaacctctaacgtgggcgctttcgtgctgtaccgtaatcatgtctcctgtaaggacttgggggacaagaattgtgtttaatgaatcttttattcccagggcccagtctagtaaatgaataagcgacctgcactaggtatagcacaaagaagtacattacaggttacaggtgagctacctgacccagggtgtatatgtgtgcgtgggtggggaggaggaagaggtctggggaactcaaaggcacggcttttatgtatggtctagaaggagagaacaggtgaactagtcaagcttagggacaaacttctccagaacagagtgtactagtggatgtaactgtagatatagtaagtcaagcagttagaaaaaaaaggctttaaaacaaagctttgatctaggcagtgaacaagacgagggacaaacaatactcttattgaatacacgtcagggaggagacagtaaaaagcacgcaaacacagtgtgttcagaatttgctgctttgaccccaggaggcaggtatttttgttacagctcttgcagatgtggaaagaggcctaaaggcctgacactaccatattcccctggggtttcttgccagctaccttgatcatcccacctgccatgtgattaccaagtgctcagacctacctttggagcctgtaggggaggagatttttcgaggtctggcccgaatgtcatagataatggggtactggaaccaagggatcctggagaggacagggataggtattaagaggccacagtttcggccgggcgcggtggctcacgcctgtaatcccagcactttgggaggccgaggcgggcggatcatttgaggtcaggagttcgagaccagcttgatctacatagtgaaaccccgtctctactaaaatacaaaaattagccgggcgtggtggcgggcgcctgtaatcccagctactcgtgaggctgaggcaggagaatcgcttgaaatcaggaggcggaggttgcagtgagccgagatcgcgccactgcactccagcctgggcgacagagcaagactccctctccaaaaaaaaaaaaagaaaaggccgcagtttcactagccttgcccggtttcccctcaccacgcgttttttggcctgctcctctccacgaccacagacaaggagagattctcttgtccctctggaaaacaacagtttgtatgctgctggaggttctcgcagcacccactatcctaggggcagggatgaggagggtgggaaaagagcagcgttgaatcctgttgcacgtccgactatagccactgctgggtcggcgtcaagggtgaaaggtcagggtcagcaggctctgcccgccattacctgaagtgaaggccctcggccaggatagtgtcctgctgcactccaccgatccgattgaagaagatggctctgtgcccgccttccactgtggggagatgggtggtgatcaggccaggccgctgctcagaggaaatgctaggcccgtggaggggcgcggggacagggcaaggggtttgggggagggactggaagcgtccggcgagcaggcggaggttgctcaccggtgaacacagattcgcgcacaccgtaggccacggcgccggcccccagcaacagcttcagggccgtgcccatgccccggggcccggcgggcagccgtcccgccaagtccttcaagttctgggccatgtctgatcttgaggccggcggcactggaggtcagaagggggtgccggcccgcctctaccccgctccggcttaggtactgcacccttcacacgagggttcgggcccgtaaggctggcgaaagaaagggcagcggaagtgcgctccctttgaaaccctcccccttagcccactacggacccg

SEQ ID NO: 260 - DNA, 738 bp, Homo sapiens
ccaaataccattattgattgattgattgactgactgagacaaggcctcactcctgttgcccaggctggtgcagtgatgtgatcatggctcactgcagccttgacttctggggctctggtgcatcctctcacttcagtcccctgagtagctgggactacagacacatgctaccatgcccagctaatgcaaatatcatttttaaaaggcgactgaactggacgcctcatatgagctcccatggctgcccagacatgctttcatgtcagtgattatataattttttttgtaaattagcttatgcaaataatcttgtggaccctaacttatacatgcttctgcaaagaaacatgtttaacgataaagttatactggaattcaaaacatgatgttttatggaatgtaagacattggggtatagataaaaagtggttggaaaaaatatatatatttatttttagagatgaggtctccttctgtcatctaggttggaatgcagtggcatcatcatagttcactgcagtctcaaattcctgggctcaaatgatcctcccaccttggtctcctgaatagctgggactacaggtgcatgccatcatgcctggctaattaaaaacaaaatttatttatttatttttgagacagaatcttgctcttttgcccatgctggagtgtagaggtatgatcttggctcaatgcagcctcaacgtcctgagttgagcggaggaccccgggctccag

SEQ ID NO: 261 - DNA, 696 bp, Homo sapiens
gccagataattagaaggaaaacaaggagagtagatcattatagaaactaaaggaatgacaggggaaaggcatgtcaaatgatgctaagaattcatgttaaatgagggctcaaaagtgccaggatttggcaatgtagagattatccataacatttcagagagctgtttggagagttaagaagtccaaggcagaagtctgatgtgagtggacttgctgcttaagtgaacatggaaccatcacccaactaactgcattttttcattccaaaataatatttgctttctggttataaaaatgtactttttaattagagaagaatgaggaaatatggagacaaaagaagacaaataaaatgattcccaattttccaaccaatgtcagctaatattaatattaatctattgacattttctttttttttattttattttatttgtatacttattaatacagatagttataatttttatttgagtattgtcgactaagttgccttgatcttattattctgctttcttttctctatgtttcttcttgcctttaagtatttttgaaattacaatctcggctggatgtggtagctcacatctgttttcccagcactttcggagactgaggcagaaggatcccttgagcccaatagtatgagatcagcctgagcaacatggtaaaatctcataggtaaaaaatacaaaa

SEQ ID NO: 262 - DNA, 469 bp, Homo sapiens
aaaagaaaactctcctttgaattaaggtaatccttcttgaaaggcttgtttaaaatgtttccttgttacctgggagagagcaggaagcactgggaaatagcacgtcactggtgcctcgtgccatttccgtgcctttccctgtcttgcctcagccttgcactgtggaatgcaaaagagtagaagaaactccaacgtgaaaattgtcgacaaacaatgcagagaatcttcggtggcattaaacattaaaattaaagacacatggtcttaaattcagctgatatacttgacacctcagatatactcttggtgccaaaagggatgttaagcaaaatttgagggatttgactccttatttgggaaagaccatgactaccaaggggagagaaaccagaggcaaaccttattgaaaaatggagtagctaagtcattttgtatatgttacttttacccagccaagtacagtctgtag

SEQ ID NO: 263 - DNA, 476 bp, Homo sapiens
gatgttcacgtttttgaacttacacatattcttctgtataagtaaaatatttcataaaattaaaaatgttttataaaattaggaacagaatttcttaaagatcaacatggtactaatacatcttacaatctgtctttcaaagtttcaatagacttaacttagagtcattttttaaattgcattttgatgccaatataattcatgtgtcattttccgctataatacaatgaaaatccagataatggagatggattttcttctgagtagccacgcatattaggtttcaggctccaattgcctggttttgaattgctctttgccatgtgctgtctgtgaccttgggtgggtcacttcacctcccccaaatctaggtttctccaatacctacctccaggcttgttctaggcatgaagtgcagtgatgatggagaaggcatggactgtggcacaaatagaagagtcaggggttggcagctc

SEQ ID NO: 264 - DNA, 364 bp, Homo sapiens
ataagcgtgagccaccacgcctggcccagataactcttgcctgcctgatttttttataatgatgcactttgttttgttaaaaatttataaatttaaagacaaaatatgcaaaaatgtgccctggtctcagaaataacacagcacattcgagtgaagttgttggcagttccgtgtgttttggggtgattcatttttttcataggttgttggggccgtgcatccattcgtgttctgagcacactccatggtacctgatgactcgaatggatcctgttcaagcccctgggttacccaaagaaatatacttctggcctgctggttggtcagagaatgcaggacacattggggtatcgcgaggtgtcca

SEQ ID NO: 265 - DNA, 452 bp, Homo sapiens
gtgggcggttcggtgagtgctagatggggtgtctctttacaagactttcctctgagatggctgggctatgcccctgggtgctggggagtgaattgcccgtagatactgatacctgtacttaaccctgtgacggtcaagaccagatccccactctccaagcccctgggaaactggttgatgtagcccctgcagtgataccgcactcaaatccatgcagatcccctgacatggtcggggcagcacccaccacgcaggcttctgttctgagctacatgggatgttgggcgtgtgttttctaagagactgatttcataagacatgtaccagtggccgactggcctgaaacagcctggtcacagcgacatccctgagatcttagcttcttttcctcggggaattatcattggactggaaaactgaggttttgggccactctggattcagatgctttt

SEQ ID NO: 266 - DNA, 161 bp, Homo sapiens
ccgggctcaagctatcctcccacctcaggttcccgagtagctggaattacaggcatgcgccaccatgccaggctaacttttttgtattttttgtagagatgggggggtctcactgtgttgcccaggctggtcttgaactcctggcctcaggcgatcctcct

SEQ ID NO: 267 - DNA, 3242 bp, Homo sapiens
gatcatgttatctttccttaaaatctggttagatggataatttcataacctattttttttttactctttacttctgttgaaacaggcttcactgtataaataggagaggatgagagcccagaggtaacagaacagcttcaggttatcgaaataacaatgttaaggaaactcttatctcagtcatgcataaatatgcagtgatatggcagaagacaccagagcagatgcagagagccattttgtgaatggattggattatttaataacattaccttactgtggaggaaggattgtaaaaaaaaatgcctttgagacagtttcttagctttttaattgttgtttctttctagtggtctttgtaagagtgtagaagcattccttctttgataatgttaaatttgtaagtttcaggtgacatgtgaaaccttttttaagatttttctcaaagttttgaaaagctattagccaggatcatggtgtaataagacataacgtttttcctttaaaaaaatttaagtgcgtgtgtagagttaagaagctgttgtacatttatgatttaataaaataattctaaaggaaattgtgtaattatagactttttattttaaataagttaaggagtgggtagtataattaaggtccgttgcaaagctgttgttatatttgtataagataaatgctggtcagatgtaagtgtgttgtctgcaattcatcaggattaaattatgtagataacttaagggatatctctgcaaggagaaacacctttttagatcttttagatgctgcttcttcaatgcaaggaaaggaaataaccccagcgaggtactcttcagggacacaggtctagtacaagagaactcttgacggctactaagttcagccagtcttaaaaaactgtgctgtttctacaaaactttaactacagtagtttataaggatgccaacgaaagctgagggtgtagagcaaaatagttctaagcttcagttaaacttctttaggtaagatcttatttacttttcctttcttaattttcctccctaaaagataaactaatactcttaaatggtctttcagtatagtggttcttacgtagtttaacatagctataaattgagtttaacaatttataaactcaagagaataatttttataaaccctgttttccaatctgtcatttacttaaattattttggttgtttttccctttttttccttcttttcccaccccctccccctccatgtgaagatttgggtgcttaacatatcatttttttccctgccggaattttagcattgatatgaaccatggacaagtatattctgctgccacaaagactgtaaagtgcttcatttcaacagctgaggcaagccaagtgatcattaataaagcttttcttggttccttcagtggtgttggtagtaaaatggtaggtaaaagttaggctgcaagttcaataaatcatgagatttcccatcgttacacccttgtgtattcacatttcttggatcaaacattttgagtgaactaggggtttttattaaagacatttgttgtatttatggttgtaactgtacatgcttatcaggatgagactgaaagaaggtagggcaaaaatggttgaatctattttcagatagtagttcatacttgagtgaagtgtcttgtctgcattatgaagcctggtatgtatccagtactaaataggtgggttaaatgtggtaattctagttcagtgtcttaccctgaagagaaagttgtaggttggctgttgaaattcattccttagatatgatcagtttgattgcccggctttattgcctttacaggaatgtgatactcagggcttactctatacaccaatgagtcttctttgatcctaagaccaccactgaagttgtttaggttcttttggacaaacatgataaacttcttcagatactttttttttcctttggcaggaaggtgtcttgctgcaggtaactaatgaagaagtggtcaaccacagagtcttcaagaaataagaaattctgtaccatctgaaagtagttcttgttggtgccttcatttaaaaagcactctttaaaataaaagggaaatgttttctgataaaacaaacatttagttgaggttcttgatataaaacaattacaaaatgagtgttgtttgtaaaacagtaacatcaaattggctagagagataaatgtatcatgttttaaattaggttttgtgagtagacagattacaattctattttaaatataaagtttataaaataaatactttttgtatccaaatacttggtgtaatgtttacacataaaatgtgtgaatcttgttctataaatatttggttgtctaaaagatcaccatcccctaaatttttaaaagcagtttcacaaagctatgcatattttaatattaacaggtaaatgagaagagcattgtggacattattggctgtccccaataaaatgctgttcattatgcactgtatattcagcgtttgagtactcctaaagtttctggctttacttttacgtttagcaatactggtggcattttgaaaatcatggattttaaaggttaaccggctggagtggtccagattaagtggctttgcagaagcactgaggtttacaatatgtgctagattgtcaaatgtcaattagttttattgtggtttacactgagtaaatgaatatcagtgttgctttttaaatgtgtttatttggacatttatctgaattaagaaaaccaaaaagaccaggttaatttgtttctatgataatttgttttggttttgataatgtgaggtatctaacaggtaagtcaaatttaacagcaggtaacacatagaaagcagctttctgtttgaaatagctgagttcgtcaattaaagacgtacaaatatcccaactttaagaaaattttgaaggtttaaaaatgtgtggatgtacaaagacgttgaactttgaaatacatcaggttgatatgcataacctcaaaataccaactcctatccagccaaggtcaagggaatatcacacaaataggggagaattaggtaattgcacaatagactgaaatgaactgattgaaggagggtttactgaagcatgggggtaatgttggatattcaacataggcttatttcctgtgtgtatatgttgtgttgagctgtttctcttgtagaaattgaagtttaaggtagttcttgtgtagctttgagacagtgccc

SEQ ID NO: 268 - DNA, 11596 bp, Homo sapiens
ctagaaaagcggcggcagcggctctagcggcagtagcagcagcgccgggtcccgtgcggaggtgctcctcgcagagttgtttctcgagcagcggcagttctcactacagcgccaggacgagtccggttcgtgttcgtccgcggagatctctctcatctcgctcggctgcgggaaatcgggctgaagcgactgagtccgcgatggaggtaacgggtttgaaatcaatgagttattgaaaagggcatggcgaggccgttggcgcctcagtggaagtcggccagccgcctccgtgggagagaggcaggaaatcggaccaattcagtagcagtggggcttaaggtttatgaacggggtcttgagcggaggcctgagcgtacaaacagcttccccaccctcagcctcccggcgccatttcccttcactgggggtgggggatggggagctttcacatggcggacgctgccccgctggggtgaaagtggggcgcggaggcgggaattcttattccctttctaaagcacgctgcttcgggggccacggcgtctcctcggcgagcgtttcggcgggcagcaggtcctcgtgagcgaggctgcggagcttcccctccccctctctcccgggaaccggatttggcggccgccattttcatggctcgccttcctctcagcgttttccttataactcttttattttcttagtgtgctttctctatcaagaagtagaagtggttaactatttttttttcttctcgggctgttttcatatcgtttcgaggtggatttggagtgttttgtgagcttggatctttagagtcctgcgcacctcattaaaggcgctcagccttcccctcgatgaaatggcgccattgcgttcggaagccacaccgaagagcggggagggggggtgctccgggtttgcgggcccggtttcagagaagatatcaccacccagggcgtcgggccgggttcaatgcgagccgtaggacaaagaaaccattttatgtttttcctgtcttttttttcctttgagtaacggttttatctgggtctgcagtcagtaaaacgacagatgaaccgcggcaaaataaacataaattggaagccatcggccacgaggggcagggacgaaggtggttttctgggcgggggagggatattcgcgtcagaatcctttactgttcttaaggattccgtttaagttgtagagctgactcattttaagtaatgttgttactgagaagtttaacccttacgggacagatccatggacctttatagatgattacgaggaaagtgaaataacgattttgtccttagttatacttcgattaaaacatggcttcagaggctccttcctgtaatgcgtatggattgatgtgcaaaactgttttgggcctgggccgctctgtatttgaactttgttacttttctcattttgtttgcaatcttggttgaacattacattgataagcataaggtctcaagcgaagggggtctacctggttattttctttgaccctaagcacgtttataaaataacattgtttaaaatcgatagtggacatcgggtaagtttggataaattgtgaggtaagtaatgagtttttgctttttgttagtgatttgtaaaacttgttataaatgtacattatccgtaatttcagtttagagataacctatgtgctgacgacaattaagaataaaaactagctgaaaaaatgaaaataactatcgtgacaagtaaccatttcaaaagactgctttgtgtctcataggagctagtttgatcatttcagttaattttttctttaatttttacgagtcatgaaaactacaggaaaaaaatctgaactgggttttaccactactttttaggagttgggagcatgcgaatggagggagagctccgtagaactgggatgagagcagcaattaatgctgcttgctaggaacaaaaaataattgattgaaaattacgtgtgactttttagtttgcattatgcgtttgtagcagttggtcctggatatcactttctctcgtttgaggttttttaacctagttaacttttaagacaggtttccttaacattcataagtgcccagaatacagctgtgtagtacagcatataaagatttcagctctgaggtttttcctattgacttggaaaattgttttgtgcctgtcgcttgccacatggccaatcaagtaagcttcagctttcagtaattgttatcttagagattatgccacgtgaatgtattttattgtacatatggttaagctgagtaattcatattctgtattgtcatatatcaaatatagacatgtccaccaaaaattaaactttttaagcttcgagtgctgctggtcataaaaattaatttgtcctggttataagagtaatttttaaggttatttctaatgcatatctttaaatattttcgtaactgagagtcatatggagaaacttagtgtttgttgtaaaaagttgtgtttttttggctgagatacttagaatcaccaccagagggggcagttaagggaaaataaatgatacttttcagatattgaatagtgaaataaaaactttgggtcataagtaatgaaccaagagttattttctgatgtttaaaaatagaaatttgcgtttttaggttgtagggttgaaatttttggtaaagattctttaataatcctttgataatcacggtctacatttgtttatttttccttagaaagttttttttttaattaataatttaagataatttaatgttgagtaaatttatatcaagcattaatgactttgaaacttgtgtagatcagctgaggcaattttttggtgtaacacaactaatatgcagtttaacatatggtttaaatttgatgtaagttttttttttccccccagaaaactttagaaactgttcctttggagaggaaaaaggtactctgccagcaggtcacctcatatttaagaatttaatttcctgcatacaaagaggaaaatgtaaataaaaattgaaatggtattttcctttgcagagagaaaaggaacagttccgtaagctctttattggtggcttaagctttgaaaccacagaagaaagtttgaggaactactacgaacaatggggaaagcttacagactgtgtggtatgtaaattactgaattgttactggatattagtcttttagctgtatgttaagtgaatcatggaggaaataactatcagcatagtaaaaaattctattatgacttcacttataagctataatgagattaaatgctaaagtttaccctttggtttgaaaggtaatgagggatcctgcaagcaaaagatcaagaggatttggttttgtaactttttcatccatggctgaggttgatgctgccatggctgcaagacctcattcaattgatgggagagtagttgagccaaaacgtgctgtagcaagagaggtaagcaaacaatgactgtcttgtgcattaacatgaagaacgctgccctgctgaaaatcagaaactatttctgaatttagttttaactcaagattttttctcttattaaaggtgtgttgggtttctggaccattttcttaagctagcttatttttcaaaagctaggtccctaaaagctattttatatctggtagttttaaggtggatacaagcgaagtatggtactacggttgggtgctttgaattatgcttgtgtttttttctgtttggatgacttttaccccaccactattttaggaatctggaaaaccaggggctcatgtaactgtgaagaagctgtttgttggcggaattaaagaagatactgaggaacatcaccttagagattactttgaggaatatggaaaaattgataccattgagataattactgataggcagtctggaaagaaaagaggctttggctttgttacttttgatgaccatgatcctgtggataaaatcgtatgtaagtgtctaaccacaaatgtactgtttttttccagtgtattcaattttgtgtatgttaacatctgtaactttattgaaaggtaaacttttgaagctgcttaatattgttgatttaatttaaaaggagtctgaatttttcattccagtgcagaaataccataccatcaatggtcataatgcagaagtaagaaaggctttgtctagacaagaaatgcaggaagttcagagttctaggagtggaagaggaggtaattttaattctgtttcttctttatttttgttcatatataagggcttgcttctaactggggcatttattgtaggcaactttggctttggggattcacgtggtggcggtggaaatttcggaccaggaccaggaagtaactttagaggaggatctggtgagtttcaagttctacgtgtttaaaggatgagtgtgcttttattttaaatatgattaggttttcattagtagaatcaagaaatccaacctaagtcaattttcctaagacttcaaatagattgtatcctggcaagctcttgtgatttggccagacaagaagttaatagagttgtattaataacagttgtatttatctggattaataatgtaacatgaagtgtcatccgaaaagctttgacccccatcaagtgtcattcttacgtataaataggatggaatctctaagattgagacttgttaagagtccaaaatttaggcggtagatttaattatatgctttcatgttttgtgggtaaactggtagcactggtgtgtccttttctgcggttcttaattattgtgctgaggtagtaagagaactgaaaatgaatattagcaataatgctgaacagtttatagtaaacgtaatctttttttggcccctaacagatggatatggcagtggacgtggatttggggatggctataatgggtatggaggaggacctggaggtcagttttcctctacgttttggtttgtttatgtgactaatacttaactatatcgtatatttacttcatttatattttgagtttttaaacattttatattagtgtctataaatggcttgggtgatagtggtccagttatttctaagtagttttgccatcttagctgttatagcctaaggaatagagtgccattttaaatgaaaatgtaaagataaccatcagagtatctcatcttttctcaagcaaaatgattggatctagatatatctttgtacgtgcttctctggaaaagtacagaatactggatttaacagagtaaaacctaagggggtggtatatgtaggaaaaaatatgaaatatgtctaaacccgtaactagatgggaagcatcccaggataactttcaaaaagcgtaacctacggaaatgttccaaaatgtttagtgtgctcctggctgcagataaggttgtgaactaccattaaacatgaagtgtgatatatcattggcgtacagaaaaggctgatacacactgacagattttgtaacaagggacatttaaaactgagctggtaatagacttgatttctggtgttgccactcaataggcatgactaaatagtgtatctcactgttctactttttataattaaaattttagaggaagctgagttcttgtatttaactacaagttagagactcagcccacaagctttttttttttttttaatatggtttcttttttttttttttttttgagacggagccttgctctgtcacccaggctggagtgtagtggcgcgtctctgctcactgcaatctctgccttcccggtccaagtgattctcctgcctcagcctcctgagtagctgggattaccggcgtgcaccaccacgcccagctaattttagtatttttagtagagacggggtttccccatgttggtcaggctggtcttgaactcctgacctcgtgaactgcccaccttggcctcccaaaaacgctggggttacaggcgtgagcaaccatgcccagccttttttttttttttatttttgttttgcagtatgtgaaagtgtaaatttttgtttatgtccgcacttctatttacagtaaagaacatactgtgtggagtgttgggtctgttttttttctttgaaatggggtctggctttgttgctcagactggagtgcagtggtgtgatcttggcttactgcaatcttagtctcaagccatcctcccacctcagcctcctgggtagctggaactacggggtgtgccaccatgaccggctaattttgtgtttttttgtagaggtgtgggggttttgctgtgttgccctggctggtcttgaattcctgggctcaagcaatccacccgcctcaacttcccgtactgctgggattacaggtgtgagctgctgcgcccagccaagaacattgtttcgttttttgagagggagtctctctctgtcgcccaggctggagtgcagtggtgtgatctcagctcactgcaacctctgcctcccgggttcacgccattctcctgcctcagcctccagagtagctagtactacaggttgctgccaccatgtccggctaatgttttgtatttttagtagagatggggtttcaccgtgttagccagggtggtctcaatctcttgacctcgtgatccgtccgcctcggccttcccaaagtgctgggattacaggcatgagccactgtgcccaaccgagaacattgttttaagatatgtaattcgtagagagacataatagaaactttatcttttgggccagtaggaggaagtgctcttttactttccctctagcccacactactagtctagcctcacagtccttacccacaatatacatgaagtatttcaagatacttaagatttttagttttgagggaaagctgtggaattacaggtatttaactgtgtgcacatggtgttatccatttggctgagtaaccccagccaccaaatgtttaccaaggatagttattcagtccttgaagctattttagaggaatttcattaaatatttcacatggaaacttggaaagctggaaatggatgtgaggagacagttcaaaatggtattgaaaatattaagtgattacttaaaggcttattttataataggtggcaattttggaggtagccccggttatggaggaggaagaggaggatatggtggtggaggacctggatatggcaaccagggtgggggctacggaggtggttatgacaactatggaggaggtaataaattcacctgcaacctttatgtgggaatttggaattaatgtctttgtaacacttgatcttttgtttccatgtttgtcactagatgcccataaaatttgtggataagtgtttgcttttatttgtttttatgggagctttgtcctaagtccttggtttaatgtttgtattgttctgagtattccaattttttaataggaaattatggaagtggaaattacaatgattttggaaattataaccagcaaccttctaactacggtccaatgaagagtggaaactttggtggtagcaggaacatggggggaccatatggtggaggtaatttataaaaattgaggttattcagatttttgtgattaaaggattagccttttgtgacttaaagggaagataacatactaagtagtttgtactgtgggcagtgctccatgtacggtcttagtgaaaataaagaaattttgcataaatctccacagaagtactcagcaagcagttatgacatcaaattgggattagggatgttggaggtgggggtgttcagtagtttaatttctggtggggactcataaacagctaaatacagttgcaacccacattgcaagtggtatacattggaatgagggtctttgaagttaaatccttaaaccatgattcaaaccattgcttagcttatttttgaggtttttagctaggagtaaactagctttgtcttgggcttgatgtacttttaaaaaaatcccttactcagtccaaatgaggatgagagggtgaaaggaccctttatttaaaagaatagggtcagccacgaaataaaaatgtctatgaacccgagtaatttatctcctgagtaattctgctaactggctgcaaaggattaggatctgcttgtttaaaagactggatggatataaaatagaatcaactgtagtgttaggctgatcatgggaaatcaaagtaagtttgttttctcttgctgttccaacaattataggaaactatggtccaggaggcagtggaggaagtgggggttatggtgggaggagccgatactgagcttcttcctatttgccatgggtaagtagcttttgagttttacaattattattatcttgggagacatagctgcaggagtaaaagctttttaggatcatgttatctttccttaaaatctggttagatggataatttcataacctattttttttttactctttacttctgttgaaacaggcttcactgtataaataggagaggatgagagcccagaggtaacagaacagcttcaggttatcgaaataacaatgttaaggaaactcttatctcagtcatgcataaatatgcagtgatatggcagaagacaccagagcagatgcagagagccattttgtgaatggattggattatttaataacattaccttactgtggaggaaggattgtaaaaaaaaatgcctttgagacagtttcttagctttttaattgttgtttctttctagtggtctttgtaagagtgtagaagcattccttctttgataatgttaaatttgtaagtttcaggtgacatgtgaaaccttttttaagatttttctcaaagttttgaaaagctattagccaggatcatggtgtaataagacataacgtttttcctttaaaaaaatttaagtgcgtgtgtagagttaagaagctgttgtacatttatgatttaataaaataattctaaaggaaattgtgtaattatagactttttattttaaataagttaaggagtgggtagtataattaaggtccgttgcaaagctgttgttatatttgtataagataaatgctggtcagatgtaagtgtgttgtctgcaattcatcaggattaaattatgtagataacttaagggatatctctgcaaggagaaacacctttttagatcttttagatgctgcttcttcaatgcaaggaaaggaaataaccccagcgaggtactcttcagggacacaggtctagtacaagagaactcttgacggctactaagttcagccagtcttaaaaaactgtgctgtttctacaaaactttaactacagtagtttataaggatgccaacgaaagctgagggtgtagagcaaaatagttctaagcttcagttaaacttctttaggtaagatcttatttacttttcctttcttaattttcctccctaaaagataaactaatactcttaaatggtctttcagtatagtggttcttacgtagtttaacatagctataaattgagtttaacaatttataaactcaagagaataatttttataaaccctgttttccaatctgtcatttacttaaattattttggttgtttttccctttttttccttcttttcccaccccctccccctccatgtgaagatttgggtgcttaacatatcatttttttccctgccggaattttagcattgatatgaaccatggacaagtatattctgctgccacaaagactgtaaagtgcttcatttcaacagctgaggcaagccaagtgatcattaataaagcttttcttggttccttcagtggtgttggtagtaaaatggtaggtaaaagttaggctgcaagttcaataaatcatgagatttcccatcgttacacccttgtgtattcacatttcttggatcaaacattttgagtgaactaggggtttttattaaagacatttgttgtatttatggttgtaactgtacatgcttatcaggatgagactgaaagaaggtagggcaaaaatggttgaatctattttcagatagtagttcatacttgagtgaagtgtcttgtctgcattatgaagcctggtatgtatccagtactaaataggtgggttaaatgtggtaattctagttcagtgtcttaccctgaagagaaagttgtaggttggctgttgaaattcattccttagatatgatcagtttgattgcccggctttattgcctttacaggaatgtgatactcagggcttactctatacaccaatgagtcttctttgatcctaagaccaccactgaagttgtttaggttcttttggacaaacatgataaacttcttcagatactttttttttcctttggcaggaaggtgtcttgctgcaggtaactaatgaagaagtggtcaaccacagagtcttcaagaaataagaaattctgtaccatctgaaagtagttcttgttggtgccttcatttaaaaagcactctttaaaataaaagggaaatgttttctgataaaacaaacatttagttgaggttcttgatataaaacaattacaaaatgagtgttgtttgtaaaacagtaacatcaaattggctagagagataaatgtatcatgttttaaattaggttttgtgagtagacagattacaattctattttaaatataaagtttataaaataaatactttttgtatccaaatacttggtgtaatgtttacacataaaatgtgtgaatcttgttctataaatatttggttgtctaaaagatcaccatcccctaaatttttaaaagcagtttcacaaagctatgcatattttaatattaacaggtaaatgagaagagcattgtggacattattggctgtccccaataaaatgctgttcattatgcactgtatattcagcgtttgagtactcctaaagtttctggctttacttttacgtttagcaatactggtggcattttgaaaatcatggattttaaaggttaaccggctggagtggtccagattaagtggctttgcagaagcactgaggtttacaatatgtgctagattgtcaaatgtcaattagttttattgtggtttacactgagtaaatgaatatcagtgttgctttttaaatgtgtttatttggacatttatctgaattaagaaaaccaaaaagaccaggttaatttgtttctatgataatttgttttggttttgataatgtgaggtatctaacaggtaagtcaaatttaacagcaggtaacacatagaaagcagctttctgtttgaaatagctgagttcgtcaattaaagacgtacaaatatcccaactttaagaaaattttgaaggtttaaaaatgtgtggatgtacaaagacgttgaactttgaaatacatcaggttgatatgcataacctcaaaataccaactcctatccagccaaggtcaagggaatatcacacaaataggggagaattaggtaattgcacaatagactgaaatgaactgattgaaggagggtttactgaagcatgggggtaatgttggatattcaacataggcttatttcctgtgtgtatatgttgtgttgagctgtttctcttgtagaaattgaagtttaaggtagttcttgtgtagctttgagacagtgccc

SEQ ID NO: 269 - DNA, 423 bp, Homo sapiens
gctgtcacactcaagggggtgcccttactcagtttattcactagtgtgaaaccagatttctgtatgtgtaagcttttccatgtagcccaatttggtagatgccaaattgcttgacctaataaatactagttaggcattgggagctaacaatgtaaggcaacaagtctcagtttgtcactgatggttgaaaagtggaaaacatctgtcaggacacctggactgcatgttacataaattcgctctctttaaggtttggaactaatatactgagatgttgacaggccctacataatttttgacatttccactatttagtaatgcactaacactggcttgttttggggtagtggaggggaattggtaacaaatcagttgagttgcatggacttaacagagaacaaatcgttcagagactgagatggg

SEQ ID NO: 270 - DNA, 16163 bp, Homo sapiens
tttatcttttttttttttttttttttttttttttttttttttttgagaaagagtctcactctgtagctcaggctggagtgcagtagcgcaatcttagcaaactctgcctcccgggttccagcaatctcctgcctcagcctcccaagtagctgggattacaggcagatcgactattggagttcttaagttgttaaaattgctcctcttattcagtgaatattcaaggcataaattcacttgattcaacaaaggataaaagggtctctattgtataggtaacatacaaatacagacacaaaatattcacatttcacttcatattagagattgttttattgttgttgttttgagatgaggcctcgctctgttgcccaggctggagtacagtggcacaatcatagctcactgcagcatcaaacttctgggctcaacggatcctcccaccttagcctcccaaagtgctgggattacagctatgagccaccgcacccggtctctttttttcttgatattcaatgtccatattggcttaataaaacgaaaagggccaggtatggtggttcacacctgtaatctgagacagaaggatcacttgagatcaggagtttgagatcagcgtaggcaacatagtaagacctggctctaaaaagtagccaggcatggtggcatgtgcctgtagtcccagctactcaggaggctgaggtgggaggatcacttgccctcaggagtttgaggctgcagtgagttgattgtcccaccgctctccagtgcagatgacagacgaggacccccatctctggaggggagaaaaaagcctactgtaaggatcaaatgtaagacagcctatgagtttttcccattaaaacacatttgtcttcattagtcttctgggggaatagagccatacatatgagtccagctaggagcctgagggtcgtgtggttaagacaaaataaactgggctgttttttgtgtgacagaaatagaaaaggaagatctagtaataatcaaactcaaatgcatgatttcctgtcatgcattgcttaatgacagggatgttctgagaaatgcatcattaggcaatttcattactgtgtgaacatcacacaatgtacttaggcaaatctagatggtacagcctactccacacctaggccagatattgctcctaggctacaaacccatacagcatgttactatattgaacactgtaggcaactgtaacacaacagtaagcattcatggatctaaacataaaaaaggtagtgtaaaaatactgatattataatcttatgggatccactatcgtatatgctgtccatcattgatcaaagccttgttatgcagaacatgactaatctacatatgaggaaatgcaaagttaaatatgaaaagaatgctcaacaaaatcaaacatgcaaaattaaaccaagatgccatcagattgactaaaaattagtaaaatcggcctggcaagtggatcatgcctgtaatcccagcactttgggtggctgaggtggaaggatcacttgagccccggagtttgaaactggcctgggcaacatagtgaggccccatccctaaaaaagattaaaaattagtaagatcaatgttgttaatttgtagtcctagtgaggaaatggggtaatggttattgatagaaatcactgcaatcttgacttctctgatgacttctgagaatccatctatctgctaagtgtcactatatgtaagaatgtgcactacattaatccttttttcgagacagagtctcgctctgtcactctgtcaccaggctggagtgcagtgacatgatctcagctcactgcaacctctgcctccagtgttccaaagtgattctcttgcctcagcctcctgagtagctgggactacaggtgcacgccaccatgccctgctcatttttgtatttttagtagagacacggtttctccatgttggccaggctggtctccaactcctaacctcctgatctgcccgccttggccttccaaagagctgggattacaggcgtgagacacctcgcccggcctcactacattagtctaatagtaggaaactaccaaccacctgagtactcatacccagcaattggttaagttggggagctgccatatgataccctactatgtccctatttaaaaagatataaaatatcttgattactaaacaaacacaagacactgttctgtctcacatgcatacatttcacccttataggagcccatgaataacagatgaggaaactcagacacagagaggtgaagtacattaatttgttcagaatcaaatagcagattccaacccaggtaacctctctggagtggctagcagctatgctagaatagagtatattttagtgtatttattaagtaagatgacccaagataacaactgggtgaaatataaattgcaaatatattttttgttaaaaactattttttttgagtttcactcgtcgcccaggatggagtgcaatggtgcaatcttgtctcactgcaacccccgctccctgggttcaagcaattctcctgcctcagcctccacagcagctgagattacaggaacacacccccatgcctggctaatttttgtatttttagtagagagggggttttgttatgttggccaggctggtcttgaaatccagagatatgggtatcaattgaacttcgggtttgaagcaaggaaattgatgaggtggccttacttctgtagcatctgagttgttacaagaagcctattacataaacatcagagggtagaaatgatagaaaaagggttttctcttcagctaaagatctaagctccaggaattcaagaatttgaatgaatggtttggctcaatccttccataatacaccgtggtagacaggagagatggaaagaggaagagaggaagggcgagaaagatgatgcaagatgctccactgcttgctgattctgaagatggaaagggccaggaaccaaagaatatacgtggccttttgaaatggaagagagaaggaaagattctgccatcaaagcctccagaaggaattcccctgataacctgacttcagcttgcttaattttggacttctgacctacagaactattttcagccataaatgggttaaatttgtggtaatttgttaaagcaccaataagaaactaatacaaacactagagaatataaaaaaacaatatttttcaaattttttgagaaacagtctgtcatccaggctggagcacagtggtattgacatagagctcactgtaaccttaaactcctaggcttaagggaccttcccaagtagcaaggactacaggtgcaagccaccacacccagctaattttaaaatttcttgtagaggtgggggtctcactgttgcccgggctgatctcaaacttctgggattcaagtaatcttcctgcgttggcctccccaaattttgggattacaggtgtgtgccaccatgcatggccaaaggacaatatattgttttcagaaatgcccttagtaaaattgaatgtagggccaccaactactaatatgaatagaaggttctctatcatctgtgaacccaccgctgagagcagtggtgggtatatatatatatatataaggaggtacttaataaacatcagttatttacctttttctgtatggattttggaaatcaattaaaatgtgtctatcatcacactgagccctatcagaatactttacattctttagaagacagttacaacaaaccagaatttaaaacctcattttaatgagacaattgaccctaggcatcacatgaaacttttatttcccaactgtggaaacattcctgtggaaatacatattcaagtttaaaactcgtaagctcaaaagatctaggatatgtactgtaatgccttactggtatcatctaacttataaacaaagataatccaatgagtgtgggcatttctatttctactgtaaaggcatatcaaataaagaaaaaagtctaataattgcataaaggaatataaaactatttattaaccactgttcaccagtatttacaataaagtaaacaatatacagttggataacattttgattactacaaagttgttcttcctggcttttgctgaaccagtaaagcaaactcaagattgagcctccatgtaatgaattggggtaaagaaaaaacatgcaggtcaataggttaggttacaaaaggttgttcacacatttatgacagcaggtcctaaactgccaacacctctaaccatctgattaggtttctatgagccaagtcttacatattccattcatcatgaccttttagtcaatgtagcaacagggattccaacattttgctaaggaatggcccgctagggaaacttttaaatgttcatttaacttagttttgtttagctagttaaaacacactagcatttgtctagtttcctcatctggatgaggaaacctgctgtgatggcagtgataaaatttttccttttaggaattttgcaaataaaccactgcaattatagacactttaaaattatccaatttaaattgtcctatctagaattacttatttcacttgaaatgtatggtttcaggaaaattttcaatttaacttgaagggattatctcttattttgcttggaataatggcatctcagaaacatgggtttacctgtgatttttttgtttgggtgaatgcttaaaaacaaaaaaaaatttacatatgcattttatggatacacacacacacacacacacacacacacacaaaaaacacgtaataaatctagaatggtccttaggctcatgagaacacaagttttgactgagtaatgactatggacatttcccccaacatttagaaaagctgttctttaatgaagaggaaatgatataccatggtatcaaatgttcttttctgataaaggaagcaactacagaaagcttttatttatttgttcaaagtaaccagtgctatggatgcaaaaaacccccaacaactcttccaacgctactttcaaaacaaacatatcaaacttgattttcattaggatgtagttattttgtcacactagtaaatcaaaatctaagacccaatttttatatatatatataaatatatataaaagaacaatgtgaacaattattgagcttcatcttctggacaagaatgccaagttagtctctcttcataaaaagcaattacaatttgaggacacttcatatttgcctctttcgccagcaccaagtctgcctcatctgaatctttcctgttttaagaaaaagaaaaattcagttacaagtcgaagttgttcatgtcaaccgacagccattcatttaagaaataatagtccaaacaaaaggtattgaagtgctccaggagagttatgttacttgttgctatgttctaataaacttcattttcaaaacaggccacagtttgctgacccttgctttaaaacactactagtaaaagtaaccagaatcatcctctcagcagatagtttttccctacctaatgatgaaaaaccatttcacaaattaaaaaaaaaaagctactcttactttcaaatgtaacaatctctgcatactcaccatttcatgagaaacatcaattctccactgctgtctgtggcaccaattattctttcaggatcaagacctctggcaaatcctcttggtttgtcagcctgtttagaagacattttttcatacagcaaactcagagtattaaattgttttcatggcgtattttaaataaaaacattccaatagtgagatggaaatgactagagcaagaacccatatttggtaattaaaaacatctgatttccattaactttacaagcagaaaaacctgagtttgatactcaacgtagaatacttaaaatttctgaaaacattcagaataaaaagtcaagaaaattactgcgttcaatgacaccaaagtcagagttgtgtgggcatacagaaaaactaacctctttatttctggtaataataaagtcttgaaagttaatatatttcaaatgacttccaggaattagtctgaattactgacacattttaaaagcataaacaaaacacaaacggtaagaaatattaaaaatgttaaaactcataccaactatctgtaatcattctaaatgatagtaaatgttagaacaaacttgtgtaacctgtggcccaggatggctttggaggcccaacacaaatttgtaaactttcttaaaacattgaaactttcttgcgattttttttttttttttttttagctcatcagctatggttggtattaagtctattttatgtgtagccctcgacaattctcctaatgtggcccagggctgccaaaagattggaccccctgcgctagaaagtacttaatataaaccagtggctctcaaaatgtggtctacggattcactggggattccagagtcctttttgggagggggttgtgtaaggcccccttttttcatctatttgtgactttggattgtcttcatatacctccaccaaaatgatccgccacagcaatcaaatgtgtttaagtaaaattgccttaagacacatgttgaatatctgtaaaaatgtaaaatgctactcttctcagcttttttagaaaagtcattttagaaatttgttttaatttctactgttagtattgataattataacccatataaacaaaagctctctggggatcctcaataatttttttagagtataaagaggccctgagaccaaaaaaagtttgagaaccaatgatatcaataaatcctttattcctgtcagagttttacatcaatgtcacaagctctggagtcacactgcctgggtgagaatgatggacctaccccacttacgagctgtgtggctttgggcaagttaattaacctctttgtggtttaggttaataaaacagaattttagtatctactgcacagatatttcacagcacattaaaagcaaataatttggcacacagtatagcacatgctaaggactcaataagtgttgttaaagttgtgcctgatttattatttaataattttttgagacaaggtcttgctccgttgcctaggccaaagtgcactggcatgatcacagctcactgcaccttgaactcccaggctcaagcaatccttctgcctcagcctcccaagtagctgagactacaggaggtgtccaccacgtcttgctgattcttttttttttctttgtagagatggggtctcactatgttgcccaaactggcctccaactcctgggctcaagcgatgttcctgctttggtttcccaaggtgctgggattataggtgcgagccaccgtgcctggccaaaactgcttctgttgagcatgtgatttattttcaaaaccaaatttgtagtcaatctcgtttcctcatctgtaaaatagtgattatacctatgaccttatacagagttgtcttgaaggttgtacttggcttctagttcaaatgatcaagttttaaatcatgtttagtgcctgagcctagaacctaattcagcaccaagatgtttccccaaattgccacactaggtcagtaggcaagacaagtataatctgttttacaatcaagggtgtaagtaagaagttacctgatttgcctgacgccacagagacataagtaaagcaaagactggaccaaaacacatgtatagtgaatgaactgaatgtctcaattcatgccaagaaaagtgtttaactattatcaaagattacagacttcaaaatcaaggtattgtttggcaatacaaagatgacatgcaagtacttttcggtggtcaatgccattgatggactataatcagaaagttctatttgcgttgttcttactgtagtgcaaaggctttcgataatccaatcttagtattgtttgtatttaagattgctagccttggatcacaggtaattggtctgatcagggatcaaatccatgaaactaagaaaaattgcactagcacaacctaagtggcatgagcacttactgcacatttacacaaagtaggctaaaccacgcccatccttattgtcctaagtattaaaatatttaaaatacgattaagaggccttttataaaagtatctgaattttaaaaaagcaagtcgtcaaaggtgggcttggtgtggtggttcacgcctgtaatcccagcactctgggaggccgaggcgggtggatcacctgatgtcaggagtttgagatcagtctggccaacatggtgaaaccccgtctctactaaatatacaaaaaccagctgggtgtggtggtacacgcttgtaatcccagctactctggaggcggaggttgcagtgagccgaaactgcaccactacactccagcctgggtgacagagggagactctgtctcccaggaaaaaaaaaaaaaaaaaaaaaaaaaaaaaaaaaaggccaggcgtggtggctcatgcctacaatcccaacactttgggaggccgaggcgggaggatcatgaggtcaggagttcaagaccagcctggccaacatggcaaaaccccatctctactaaaagtaccaaaattagctgggcgtggtggtgggcacctataatcccagctacttgggaggctcaggcaggagaatcgcttgaacccaggaggcggcagttgcagtgaccaagatcatgccattgcactccagcctgggcgacaagagcaagactccatctcaaaaaaacaaacaaacaaaaaagaaatcaagccatcaaccttttacaaaaggacaagctggtgggcaatattttatacttacagcatctcttttcttctttgatttgctgtcatcagattcactgtcagataaagattttctttttgtaccatctttttctttgccagctttctgagagttaagaaacgcttcaatcaattctggacaatctaaattttcttcaggttcccaagtattgtcagcactgtgtttagtttattaaaaaaaaaaaaggtgattgaattaaatatgattcatcaccattatccagatctattttaatagacacccgggggaataaaaagtcctctgtactgcagatactaatcatttcctccttccctacattaccccaccccccagcctgcctccgccagagacagggtcttgctttgttgcccagacgagagtgcagtagtggaatcatagctcactgaagattccaactcccgactcaagcgatcctccacctcagcccaagtagctgggactacaggcatgcaccaccatgcccagctaacttaaaacacacactttttttttttttttaatagagaaggggtctcattttgttggccaggctggtcttgaattcctggtgtcaagtgatcctccagccttggacccccaaagtgctggaattacaggtgtgagccactgcacccaggccctatattctaatttgctaccctgagactccaaattagtaaacccaaattactgggtagaggacaataaaagtctctgctctgtagtattattttcattaaagtcttctttggcctggcacggtggctcacacctgtaatcccagcactttgggaggccaaggcaggtggatcacttgaggtcaggagtttgggatcagcctgaccaacatggtgaaacccggtctctgctaaaatacaaaaattagccgggcatagtggcaggcgcctgtagtcccagctactcaggaggctgaggcaggaaaatcgcctcaactcggaaggcagaggttgcagtgagctgagatcacgccactgcactccagcctgggcaacagggtgagactccatctcaaaacaaaacaaaaaaaagtcttttacattacctgttacactgcacatgggaagtacgctataatcatgctagtggccttaagttttgggagaagagggaggagcccattcatttcctaatgttttgatgggtaaaaataatttttcatgtttcatgggcttaataaagaagggacttacgacacatacttaatttaaactaagaatactgaaggataaaacaggcaaacgtaaatctcccattcaattcataattcccaaactgctatgaattaaatgtgaagagcaggggaagtaggagataacagataggtgaagcccaatcattcgactatcatatgctccatctccagcgtgctcaggaaattgatctccacctatccatttttaattgtcactgcctatggagctttgtggtgtaagggggaagaatcaaagcagataagcacaacaaaccccaagcgttaaagtatgtaattgttgcatgttcaagttattcacattttgtgaataacattatcaagaataatgagagcaatccatatcaaagaacacaaggaaccagagagcttaaaacatgcccaggttctacttcttaggtataaggatataataaacctagtataaagcctagattatatgtaatcctgtatgagacccactagtctatattgtaaagcttcaatgtttttagcaccctctgtgtggaggaaaataatgcagattattctaattagtgtaatatctaaccacattaaaatatattacatagtaaactacactccataattttataaatttgactccccagggtaataaactagtctctagtctgctcaccttcaactgtacaataaagtcttggttcttttgaaatagacctcaaatgagacacctaaaattcaaagtgtctttacatttaaagacacctacaggaaagcaggtaaaagagccaggttaaaaacaaattctaaaaccacttagctgcagttaaacatatagtaaagatgcactaaagtttcttactctgtaaatcccttccacttcaggaaatattccactttcccattcactacacgtcgatctagtactttttccacgacaaattcttcaggctctgcctcttcaacttttttactctttccattctgtttttttcccattttttgctaaaataaaacaaaagagaaattaagaaatattcctcttgaattttgagcacattttcaaggctcaattgcttatattattatcacattcgacataaatttttacttctatatcccagggcagacaccttctggaaagattaaaagtcaacagacaataaaataaaagaatgctttatcttgttcatttagttcaaacttacaacccaccaccaaaataatacaataaaaaaacactatctggaaacagttatttttttccagtctttttttttgagacagggtctcacactcttgtcgcccaggctggagtgcagtggcgtgatctcagctcactgcaacctccgcctccccaggttcaagcagttctcatgcctcagcctccagagtagctgggattataggcggatgccaccatgccgggctaattttttttgtgtttttattagaaacagggtttcaccatgttgaccaggctggtctcaaactcctgacctgaagtgattcaccagcctgggcctcccaaagtgctggcattacaggcgtgagccactgcgcccggccctgtagtcttaaaagaccaagtttactaattttcactcattttaacaacactgcaacaaacaactatgcaggaagtacctaaagggtgatacagagaagcaagtagtagtgacaggtcttaggtgaacctatgacagaccttgtatccacccccagatggtaaaagccccagcccccttctcaattcaaatattaatgtcaaaagcatcaatgatacagagaaaagataaatgcagaatgaaaacatggttcaaaatcctgataccaactgcagggtcaactatagagaccactaggaggttcaattaaaggacaagattatttttccataatctctgtagataatatttcctaccacttagaacaaaactataaagctatcacttcaagagaccaacattacaaatttattttaattccctaaggtgaaaaaaatccttccttcctggtttctcaagagaaagtctatactggtaaccaaattcactttaaacaggcattttctttggtatgacactatttaagagaagcaggaaaccaacgtgaaccagctctttccaatggctcaagatttcctatgagaggactaaaaatggggaaaatttttatgagaggattaaaaatgggggaaaaaaaaccctgaaatggttaatcagaagatcctatgggctgagaaggaatccatcttaacatttcatcttaaagcaaatgctattgccgggggcagtggctcatgcctgtaatcccagcactttgggaggccgaggtgggcagatcatctgaggtcaggagtttgagaccagcctgaccaacatggagaaaccccgtttctactaaaaatacaaaattagccaggcatagtggtgcatgcctgtaatcccagctacttgggaggctgaggcaggagaactgcttgaacccaggaggcttaagttgcggtgagccaagatcacgccattgcactctagcctggacaacaagagaaaaactctgtctcaaaaaaacacaaaaacaaaaaacccaaatactatttaaaaaagataaaccttaattgctcaatcattaaagccatcccacaagtaaagcagcaagcagaaaaaagttaagaacacctcaaggctacagaaggacatttcaagctatgcaggcatatgaagtgtgcagacagatatgtaagaaaggcctcaagactgcaaaagggcatttcaagctatgcaagcatataggtaacacatacacacacacaaaataaaaatcccctgaaatacaaaaacatgcagcaaacacctgacgtttttggataccatttctaagtcaggtgttatgattctcattagtcaagatacttgagtactgggcccaaacagctttctgccactgtacagtacaagaaggtaggaataatggtgggaggagcaaagacaaactgtaatagacagaagtgtatcagatacctatactacatgaaaaacaaaacagctactgccacaaagggagaaggctaacaaaataaagtcaacaataaatacagaaaatgaaaaggatacacactaaggtttacaaaaaaaaaaaggcagacaaaatgccatacagtattcattcactactatggcattcataagctagtttcaaatgctcactattttcttttatagtatatatttgccttaacccagcacttttttccaaaagtggatgagtcaaaataaatttcccattatttaagtgaaattaacagcacacatatctcacaacactaatgaatttttaaaatggaaagttaagaacttttaaagtggccaacctgtgatccttcacaaaataaactaaatacaataacagaccccaaaggctatcaattgcgtgcaaaaacaacttctgttttccagggtaaacagaatctaatgcagaatctaatgcagggtaaacagacttaatgcagaatctaatgatggcacaaattaaaaatcactaacgtgccctttttagtgtgaaacccagagagagcacatacaagccaaaaacaaatgctttattttacctaggagacattaacattcacctttacgtgtttaagattaatgcaatgttaaatattgtgaaaactgtaactttgaatttcatgatttttatgtgaatattccagggtttaaaaaaacttgtaacatgacatggctgaataagataaaaaaaaaatctagccttttctcccttctggctcatatttgcgatttcgatcattttgtttaaaaaacaaaacactgcaatgaattaaacttaatattcttctatgttttagagtaagttaaaacaagataaagtgaccaaagtaatttgaaagattcaatgacttttgctccaacctaggtgcacaaggtaccttgttctttaaattgggctttaatgaaaatacttctccagaattctggggatttaagaaaaattatgccaaccaacaagggctttaccattttatgtaacatttttcaacgctgcaaaaatgtgtgtatttctatttgaagataaaaatcctcagcaaaatccacattgcactgtccttcaaagattagccttctttgaactagttaagacactattaagccaagccagtatctccctgtaatgaattcgtttttctcttaattttcccctgtaatttacactgggagagctgggaaatatgtggatgtaaatttctcagccacagagatgcaaagttatactgtggggaaaaaaaacttgagttaaatccttacatattttaggttttcattaacttaccaatgtagttttgttggaggccattttttattgcagacttgaagagctattactagaaaaatgcatgacagttaaggtaagtttgcatgacacaaaaaaggtaactaaatacaaattctgtttggattccaacccccaagtagagagcgcacatttcaaacgtgaatacaaatccagagtagatctgcgctcctacctacattgcttatgatgtacttaagtacgtgtcctaaccatgtgagtctagaaagactttactggggatcctggtacctaaaacagcttcacatggcttaaaataggggaccaatgtcttttccaatctaagtcccatttataataaagtccatgttccatttttaaaggacaatcctttcggtttaaaaccaggcacgattacccaaacaactcacaacggtaaagcactgtgaatcttctctgttctgcaatcccaacttggtttctgctcagaaaccctccctctttccaatcggtaattaaataacaaaaggaaaaaacttaagatgcttcaaccccgtttcgtgacactttgaaaaaagaatcacctcttgcaaacacccgctcccgacccccgccgctgaagcccggcgtccagaggcctaagcgcgggtgcccgcccccacccgggagcgcgggcctcgtggtcagcgcatccgcggggagaaacaaaggccgcggcacgggggctcaagggcactgcgccacaccgcacgcgcctacccccgcggcggccacgttaactgggcggtcgccgcagcctcgggacagccggccgcgcgccgccaggcctcgcggacgcgggaccacgcgccgccctccgggaggcccaagtctcgacccagccccgcgtggcggctgggggagggggcgcctcgccggaacgcgggtgggggaggggagggggaaatgcgctttgtctcgaaatggggcaaccgtcgccacagctccctaccccctcgagggcagagcagtccccccactaactaccggcgctggccgcgcgccaggccagccgcgaggccaccgcccgaccctccactccttcccgcagctcccggcgcggggtccggcgagaaggggaggggaggggagcggagaaccgggcccccgggacgcgtgtggcatctgaagcaccaccagcgagcgagagctagagagaaggaaagccaccgacttcaccgcctccgagctgctccgggtcgcgggtctgcagcgtctccggccctccgcgcctacagctcaagccacatccgaaggggagggagccgggagctgcgcgcggggccgccggggggaggggtggcacccccacgccgggcggccacgaagggcggggcagcgggcgcgcgcccggcggggggaggggccgcgcgccgcgcccgctgggaattggggccctagggggagggcggaggcgccgacgaccgcggcacttaccgttcgcggcgtggcgcccggtggtccccaaggggagggaagggggaggcggggcgaggacagtgaccggagtctcctcagcggtggcttttctgcttggcagcctcagcggctggcgccaaaaccggactccgcccacttcctcgcccctgcggtgcgagggtgtggaatcctccagacgctgggggagggggagttgggagcttaaaaactagtacccctttgggaccactttcagcagcgaactctcctgtacaccaggggtcagttccacagacgcgggccaggggtgggtcattgcggcgtgaacaataatttgactagaagttgattcgggtgtttccggaaggggccgagtcaatc

SEQ ID NO: 271 - DNA, 416 bp, Homo sapiens
caaagtgctgggattataggtgtgaaccaccgcacctaggcaatatactgcctcttaaggacttttctaactggattgagatgaaggaagtgttgattcaaaaatgaggccagatcgtgtgcctagaccgtgtctgtttgacaacattcaggaggggtaggtcatgattctggatttaccgtgtttgaggtggtagaggcttttcaatgagatgtgtctagtagatgatgagaaacctgagattgagcccaggttaggaatagagatactggtttagagtcatggctgagaatatcagaagagttgttttgagagtggcaaaggcgggagagtataaagaaaagccgagaagccgaagattacacctcagagaatatctgggtctgttgatggcctttattgtctccccacttctg

SEQ ID NO: 272 - DNA, 1421 bp, Homo sapiens
tttggagtgcctttgcaggtttggaggtctagacgataatctgagagaacattccccataatctgactcaaagcgctcaacctggctcagaggacacccaggccctatgccccactcacaaggagaggtgggcaagcccccagggataggaggatagtaagcaggatcctccctgtcctggctcccagaaccagagcaaggaatggggaatcctaagggtttctgaggcatcactgaatgtcacccactccacatcaacctggctgtcacctgccaccctttttcagggaggtgagtacctgccatggtcactgttaccagatccttaaaatcctgggctctgagctaggtgcattgctctgttacccatttcctacatttgtttgtttgttcttgatttcctgggggaatgggactgatggagacagacaaacccactgtgggcagcatctaagccatgtccaaggttggtcgaattaagggaaccctggcctctcagcaggacagaaagctgagctgtggttccaggccctcctctctgggcccctggagtgtatctttttttccttgtggcttttgaaattttgcattattttaagaatccagtctttcagaccagcccttttattaagctgtgaatttttaatggattgttttaaagtaaaaaaataaaaacccagaaaacaatcaaattttaacaaaaaaatccgctactcttactcccttgcctccccctaccccagcccatgagagttcccttgcactcccctctgcctttgcaactgatcatcctccctttctccttggcttgaagcatctatgtccagtatctgtgaaatgatgttttatctgtgtgtcaggatgagaaacggcagtcattccaccaagtgttggaaactggttagcctggagacaagggtttctggggccacagctcagggatgtgtatttaattacaggatccccagaaactcctctctaggctggcacagcaacattttttctgggcttgggagccatacctgaactgtttcctccaaggcgggaactccagagagcctgccaagtctggagcaagctggggcttctgctttggccagacctgggccaccatgagacttgaaggcttctagctgtcgtacgacacgagccacggtggccctgcctctccccgctcatagaagcctggtccctctgtctagcccagttcccatctagcatccgtcttctgggcctgaagccctaaatggaccacagcctgcacaggaatcaactgtaggctcaaagggaggcggtgagtaaggtcagagcctgctccaagcccaagaacaaaagttgtgttatgggtggaggctagtcccccagatctagccctgccgtctttgccctttaatgaccattgtttctttctactaaaatgt

SEQ ID NO: 273 - DNA, 143 bp, Homo sapiens
aagaaaagaaaaaaaaaaaaaaaaaaaaaaagaaaaaacaaaaaaaaaaaaaaaaaaaaaaaaaaaaaaataaaaaaaaaaaaaaaaaaaaagagaaacaaaaaaaaaaaaatagaaaaaaaaaaaaaaaaacaaaaaaggag

SEQ ID NO: 274 - DNA, 148 bp, Homo sapiens
  misc_feature (136): n equals a,t,g, or c
aaaaaaaaaaaaaaaaaaaaaaaaaaaaaaaaaaaaaaaaaaaaaaaaaaaaaaaaaaaaaaaaaaaaaaaaaaaaaaaaaaaaaaaaaaaaaaaaaaaaaaaaaaaaaaaaaaaaaaaaaaaaaaaaaaaaaaanaaaaaaaaaaaa

SEQ ID NO: 275 - DNA, 116 bp, Homo sapiens
aaaaaaaataaaaaaaaaaaaaaaaataaaaaaaaaaaaaaaaaacaaaaaaaaaaaaaaaaaaaaaaaaaaaaaaaaaaacaacacaaaaaaaaaaaaaaaccaaaaacaaacag

SEQ ID NO: 276 - DNA, 151 bp, Homo sapiens
aaaaaaaaaaaaaaaaaaaagaaaaaaaaaaaaaaaaaaaaaaaaaaaaaaaaaaaacaaaaaaaacaaaaaaaaaaaaaaaaaaaaaaataaataaaaaaaaaagagaaaaaaataaaaataaagaaataaataaaaaaaaaaaaaaaaa

SEQ ID NO: 277 - DNA, 125 bp, Homo sapiens
  misc_feature (33): n equals a,t,g, or c
  misc_feature (49): n equals a,t,g, or c
  misc_feature (61): n equals a,t,g, or c
  misc_feature (90): n equals a,t,g, or c
  misc_feature (91): n equals a,t,g, or c
  misc_feature (116): n equals a,t,g, or c
  misc_feature (117): n equals a,t,g, or c
gttgtggaaaaaaaaaaaaaaaaaaaaaaaaanaaaaaaaaaaaaaaanaaaaaaaaaaanaaaaaaaaaaaaaaaaaaaaaaaaaaaannaaaaaaaaaaaaaaaaaaaaaaaannaaaaaaaa

SEQ ID NO: 278 - DNA, 152 bp, Homo sapiens
aaaaaaataaaaaaaaaaaaaaaaaaaaaaaaaataaaacaaaaaaaaaatataaaaaaaaaaaaaaaaaaaaaaaaaaaaaaaaaaaaaaaaaaaaaaacaaaaaaaaaaaaaaaaaatataaaaaaaaaaaaaaaaaaaaaattaaagag

SEQ ID NO: 279 - DNA, 130 bp, Homo sapiens
aaaaaaaaaaaaaaaaacaaaaagaaaaaaaaaaaaaaaaaaaaaaaaaaaaaaaaaaaaaagaaaaaataaaaaaaaaaaaataaaaaaaaaaaaaaaaaaacaagaaagacaaaaaaaaataaaaaga

SEQ ID NO: 280 - DNA, 118 bp, Homo sapiens
ggattacatactgttgccaactgaaggttggaataaacttgtcagctggtacacattgatggaaggtcaagagccaatagcacgaaaggtactgtttaataataactgactataaata

SEQ ID NO: 281 - DNA, 406 bp, Homo sapiens
gctgactctccagctgtccacctcatgatggaccatcctatgtgtaccttaaaaatgaaaatgaataataaattttcataaaagaaagtgctgaaatcaaagtggataaagtgattaacatggacagataaaaaattcagtcaccaagcacttgtacaaccactcacaagttgaagttgcagcaaataatttagatattgctggtcgaatgacatgattctagctgggctgaagctactctccatggagttctctgggtaccttccatgacacagtgataatgagccataagtgctttccttgaagaattcttaagaatcagaccatgctcctttagggaaatttacttgttttatattatcagattaataagtgtagagagggaaaccatttgcctgctaatcaa

SEQ ID NO: 282 - DNA, 406 bp, Homo sapiens
gctgactctccagctgtccacctcatgatggaccatcctatgtgtaccttaaaaatgaaaatgaataataaattttcataaaagaaagtgctaaaatcaaagtggataaagtgattaacatggacagataaaaaattcagtcaccaagcacttgtacaaccactcacaagttgaagttgcagcaaataatttagatattgctggtcgaatgacatgattctagctgggctgaagctactctccatggagttctctgggtaccttccatgacacagtgataatgagccataagtgctttccttgaagaattcttaagaatcagaccatgctcctttagggaaatttacttgttttatattatcagattaataagtgtagagagggaaaccatttgcctgctaatcaa

SEQ ID NO: 283 - DNA, 2749 bp, Homo sapiens
gagatggagtctcgctctgtcgcccaggctggagtgcggtggtgtgatctcagttcactgcaaccttcacctcccaggttcaagttattctcttgcctcagcctcccaagtagctgggattacagatgcctgccaccacacctggctaatttttcgtaaagatagggttttaccatattggccagactggtctcgaactcctgacctcagggtaatccacctgcctcagcctcccgaagtgctggtacaggcgtgagccactgtgcgtggtcctccctctctttttttgagacagcgtcttgctctgtcacccaagttgggagtgcgtggtgtatcacagctcactgcagctttgacctccagggctcatgttatcctcccacctcggccccccccccagctgggactacaggtacatgccaccacacccagttaatttttaagttttttgtagagacgaggtctagctgtgttgcccaggctggctcctgggctcaagggatccctctgcctcagcctcctaaagtgctggggttacaagtgtgagtcacctcgcccagcctcttgcttttcttataaggacactagtcctattggatgcaggcgccactccaacgacctcatttagcctatttacctccccaaaggccttgtctccacatatcatcagattgtgggttaaggcttcaacatatgacatttaattcagctcgtaccagaaggtgtttaagcattttcccattgaaatgtattcccatctttccaggtgtccatctctcatttgcttttcctacttacttagaacacagctaccttccgacaccctgtcctaaacccaccctgaactctacccctcttcactgccaacctgcctggggttttcccttgccccctagagagctctgtgtcctttcgcacacatcccatccctgccaactccactggacagacctgagccaccctctcctgcctcaccccacccatctttcttgctggtccacgttgccacactgttgttatgggagctgagacccactgcctcaaatgcctgaaccagcccagctgcccctgaggttaacaagtgggaatgtctagcttaataaaacatccatttgtgctccttacatcctgggcagggtggtagtggtaggagaacagcaaacaaatcctgaaatctcaatcagttcacttttggtagtggtttgggaaaggaaattctgaaactatattagagttattttaagattcatcaaattagtaaaatgctgaattttggggtgtcagggttctcagtgttaaagaagacacataaaaatatgggctggaggaagtcatgaattgagttggaggtcttactggatatgtacgtgtatgtgcacagacacacctttgtgtgtgacctgtgtgcaatcatatgcacatatatttcatagctcagcagaagacacctcaactggcaccctatcttggtctctaatgccattacccactaaaaggaaccagttcttcaaagacatggccaatttcagggctgaggaagggtagaaaggagatgggcttggaacatcctactacaccaaaaagcaaataagtgctaaaaaaaaaaaatggaggcatgtcacaaggatgcaggagtcaactgaagggagtctcactggcctcatctaggacaacttgagcaccaaaataagatcagcagcgagttataaaccactgaataaacagaaatcctgagtccattccaacaataaagacaaattcttggggagaaggaagagtgctggctggcagtaggatgctgagggcctgctggtcagcatggagggagggctggtgttggaaaatcaccaccctggtaatgatggattcaggcaagaatcataaatgaaagccaaatttagggggaagttttgatgaggagcaggatatttgcattatctttaatctttttgtgacaactgaagatcattgatacttgcatgatcttaaagtatcttcccaccgattcttattcgttaaaaggagaaaaagttaactatattctttttttgagacagggtcttgctctgtcacccaggctggagtgcagtggctcaatctcagctcactgcaaccttgacctcccagtttcaagccatcctcccacctcagcctcccaagtagctgggactacgggtgtgcaccaccgtgcccagcttcagcctcacaagtgctgagattacaggtgtaagcctctgcatctggcccagttagccatacagtggaaaaactgcactctaaccaggtgagcaaagagaacatcactgacaggaggaatgtggacaccgtgcaccctggatgggatgggggaaggcgcacacatgcaggccacaggtaagcagggtcgaatgttaataggtgggtctggatgagggtttgtggatgatctgtgcactattgtattttatttattgattttttttttgacacagagtctcgctctgtcacccaggctggagtgcagtggcgcgatctcagctcactgcaagctccgcctcccaggttcacgccattctcctccctcagcctcccgagtacctgggactataggtgcccaccaccacgcccggctagttttttttgtatttttttagtagagacggggtttcaccatgttagccaggatggtctcgatctcctgacctcatgatacgcccgcctcggcctcccaaagtgctgggattacaggcgtgagccaccgcgcccggcc

SEQ ID NO: 284 - DNA, 2745 bp, Homo sapiens
gagatggagtctcgctctgtcgcccaggctggagtgcggtggtgtgatctcagttcactggcaaccttcacctcccaggttcaagttattctcttgcctcagcctcccaagtagctgggattacagatgcctgccaccacacctggctaatttttcgtagagatagggttttaccatattggccagactggtctcgaactcctgacctcaggtaatccacctgcctcagcctcccgaagtgctggtacaggcgtgagccactgtgcgtggtcctccctctctttttttgagacagcgtcttgctctgtcacccaggttggagtgcgtggtgtatcacagctcactgcagctttgacctccaggctcatgtcatcctcccacctcggccccccacgcagctgggactacaggtacatgccaccacacccagctaatttttaagttttttgtagagacgaggtctagctgtgttgcccaggctggctcctgggctcaagggatccctctgcctcagcctcctaaagtgctggggttacaagtgtgagtcacctcgcccagcctcttgcttttcttataaggacactagtcctattggatgcaggcgccactccaacgacctcatttagcctatttacctccccaaaggccttgtctccacatatcatcagattgtgggttaaggcttcaacatatgacatttaattcagctcgtaccagagggtgtttaagcattttcccattgaaatgtattcccatctttccaggtgtccatctctcatttgcttttcctacttacttagaacacagctaccttccgacaccctgtataaacccaccctgaactctacccctcttcactgccaacctgcctggggttttcccttgccccctagagagctctgtgtcctttcgcacacatcccatccctgccaactccactggacagacctgagccaccctctcctgcctcaccccacccatctttcttgctggtccacgttgccacactgttgtatgggagctgagacccactgcctcaaatgcctgaaccagcccagctgcccctgaggttaacaagtgggaatgtctagcttaataaaacatccatttgtgctccttacatcctgggcagggtggtagtggtaggagaacagcaaacaaatcctgaaatctcaatcagttcacttttggtagtggtttgggaaaggaaattctgaaactatattagagttattttaagattcatcaaattagtaaaatgctgaattttggggtgtcagggttctcagtgttaaagaagacacataaaaatatgggctggaggaagtcatgaattgagttggaggtcttactggatatgtacgtgtatgtgcacagacacacctttgtgtgtgacctgtgtgcaatcatatgcacatatatttcatagctcagcagaagacacctcaactggcaccctatcttggtctctaatgccattacccactaaaaggaaccagttcttcaaagacatggccaatttcagggctgaggaagggtagaaaggagatgggcttggaacatcctactacaccaaaaagcaaataagtgctaaaaaaaaaaaatggaggcatgtcacaaggatgcaggagtcaactgaagggagtctcactggcctcatctaggacaacttgagcaccaaaataagatcagcagcgagttataaaccactgaataaacagaaatcctgagtccattccaacaataaagacaaattcttggggagaaggaagagtgctggctggcagtaggatgctgagggcctgctggtcagcatggagggagggctggtgttggaaaatcaccaccctggtaatgatggattcaggcaagaatcataaatgaaagccaaatttagggggaagttttgatgaggagcaggatatttgcattatctttaatctttttgtgacaactgaagatcattgatacttgcatgatcttaaagtatcttcccaccgattcttattcgttaaaaggagaaaaagttaactatattctttttttgagacagggtcttgctctgtcacccaggctggagtgcagtggctcaatctcagctcactgcaaccttgacctcccagtttcaagccatcctcccacctcagcctcccaagtagctgggactacgggtgtgcaccaccgtgcccagcttcagcctcacaagtgctgagattacaggtgtaagcctctgcatctggcccagttagccatacagtggaaaaactgcactctaaccaggtgagcaaagagaacatcactgacaggaggaatgtggacaccgtgcaccctggatgggatgggggaaggcgcacacatgcaggccacaggtaagcagggtcgaatgttaataggtgggtctggatgagggtttgtggatgatctgtgcactattgtattttatttattgattttttttttgacacagagtctcgctctgtcacccaggctggagtgcagtggcgcgatctcagctcactgcaagctccgcctcccaggttcacgccattctcctccctcagcctcccgagtacctgggactataggtgcccaccaccacgcccggctagttttttttgtatttttttagtagagacggggtttcaccatgttagccaggatggtctcgatctcctgacctcatgatacgcccgcctcggcctcccaaagtgctgggattacaggcgtgagccaccgcgcccggcc

SEQ ID NO: 285 - DNA, 577 bp, Homo sapiens
aagcgattcccctgcctcagcctcctgagtagctgaaatcacaggtgcctgccaccacgcctggctcattttttgtatttttagtagagatggagtttccccatgttggccaggctgcttttgaactcctgacctcaggtgatccacctgcctctgcctctcaaagtgctgggattacagggcgtgagccaccgtgcccagaccatcttcaccctttttcttaccagaaccacactcagcttggggcttaagatggataggctaagaggggaactaagcttgtaactgttgcggagacaggcactccaggtgacagttcacaggccctttcaagtgactggagccatgggatcatttctctccaaggatttgtgagtagaagtgatgtgtgtcatctcccaggtgaacaggttcggccttccctacatgctccaagggtacagtgaagagcagagctacaacagagatggggcctggatccctgaatcactgtatggagcagagtgcaaaccaatatataagcaacagcaacaccaacacaggacaatcgactgttagtaaaaatttttttttcttt

SEQ ID NO: 286 - DNA, 575 bp, Homo sapiens
aagcgattcccctgcctcagcctcctgagtagctgaaatcacaggtgcctgccaccacgcctggctcattttttgtatttttagtagagatggagtttccccatgttggccaggctgcttttgaactcctgacctcaggtgatccacctgcctctgcctctcaaagtgctgggattacaggcgtgagccaccgtgcccagaccattttagcctttttcttaccagaaccacactcagcttggggcttaagatggataggctaagaggggaactaagcttgtaactgttgcggagacaggcactccaggtgacagttcacaggccctttcaagtgactggagccatgggatcatttctctccaaggatttgtgagtagaagtgatgtgtgtcatctcccaggtgaacaggttcggccttccctacatgctccaagggtacagtgaagagcagagctacaacagagatggggcctggatccctgaatcactgtatggagcagagtgcaaaccaatatataagcaacagcaacaccaacacaggacaatcgactgttagtaaataatttttttttctt

SEQ ID NO: 287 - DNA, 589 bp, Homo sapiens
  misc_feature (427): n equals a,t,g, or c
attgaaggcagcagaaatagatgaagagcacgtggaggatgacgggctgtctttggacattcaggaaagtgagtacatgtgcaatgaagagacggagatcaaagaggcgcagagctaccagaattccccagtcagctctgcgactaaccaggacgccggctacgggtcgcccttcagtgagagcagcgaccagctagcccatttcaaaggctcttcctctcgagaagagaaggaggatccgcagtgtcccgacagcgtctcgtacccccaggacagcctggcacagatcaaagctgtgtatgcaaacttgttctccgagtcctgctggtccagcttagctctggatttaaagaagtcgggttccaccaccagcaccaacgatgccagccagaaggagaggttcggccccacccccacaccccccacntgccccgtcagcaccactggccccaccacgagcacgcccagcaccagctgcagctccagcaccagccacagcagtaccaccagtaccagcagcagctccgggtacgactggcaccaggctgcactggccaagacgctgcagcagacgtcctcgtatgggctg

SEQ ID NO: 288 - DNA, 3604 bp, Homo sapiens
  misc_feature (3443): n equals a,t,g, or c
cactcctttgagtccttgcaggacctcagcgtccacatgatcaaaaccaagcattaccagaaagtgcctctgaaggagccagtgccagccatcaccaaactggtcccctccaccaaaaagcgggcgcttcaggacctggcgcccccctgctcccctgagccagcaggaatggccgcagaggtggccctgagtgagtcagccaaggatcagaaagcagcgaacccgtacgtcacgcccaataaccgctatggctaccagaatggcgccagctacacctggcagtttgaggcccgcaaggcgcagatcctcaagtgcatggagtgtggcagctcccacgacacgctgcagcagctcaccgcccacatgatggtcaccgggcacttcctgaaagtgaccacctcggcttctaagaagggcaagcagttggtgctggaccctgtggtggaagagaagatccagtccatcccactaccgcccaccacccacacgcggctgccggcctccagcatcaaaaagcagcccgactctcccgcggggtccacgacttctgaagaaaagaaagagccagagaaggagaagccgcctgtggctggcgacgcggagaagatcaaggaggagagtgaggacagcttggagaaatttgagcccagcaccctgtacccgtacctgcgtgaggaggacctggacgacagccccaagggagggctggacattctcaagtccctggagaataccgtctccacggccattagcaaagctcagaatggtgcgccctcatggggtggctaccccagcatccatgcagcctaccagctcccgggcaccgtgaagccactgccggcggccgtgcagagcgtgcaggtgcagccgtcctatgctggcggcgtgaagtcgctgtcttccgccgagcacaacgccctcctgcactccccagggagcctcacgcccccaccgcacaagagcaacgtgtctgccatggaggagctggtggagaaggtcacgggcaaggtcaacatcaagaaggaggagagaccccctgagaaggagaagagctccctggccaaggctgcgtcccccatagcaaaagagaataaagatttcccgaaaacggaggaagtcagcggcaaaccacagaagaagggccctgaggccgagactgggaaggccaaaaaggagggaccgctggacgttcacaccccaaatggcacagagcctctcaaagcaaaggtcaccaacggctgtaacaacctggggatcatcatggaccactcaccggagccttccttcatcaacccgctgagcgctttgcagtccatcatgaacacccacctgggcaaggtgtccaagcccgtgagtccctcgctggacccgctggcgatgctgtacaagatcagcaacagcatgctggacaagccggtgtaccccgccacccctgtgaagcaggccgatgccatcgaccgctactattatgaaaacagcgaccagcccattgacttaaccaagtccaagaacaagccgctggtgtccagcgtggctgattcggtggcatcacctctgcgggagagcgcactcatggacatctccgacatggtgaaaaacctcacaggccgcctgacgcccaagtcctccacgccctccacagtttcagagaagtccgatgctgatggcagcagctttgaggaggcgttggacgagctgtcaccggtccacaagaggaagggccggcagtccaactggaacccgcagcaccttctcatcctgcaggcccagttcgcctcgagcttgcgggagaccacagagggcaagtacatcatgtcggacttgggcccgcaggagagggtgcacatctcgaagtttactgggctctccatgaccaccatcagccactggctggccaatgtgaagtaccagttgaggaggacagggggaacgaaattcctaaagaacctggacacagggcatcctgttttcttttgcaacgattgtgcctctcagttcagaactgcttctacatacataagtcatttggagacacacttgggcttcagcctgaaggatctctccaagctgccactcaatcagattcaagaacagcagaatgtttcgaaagtcctcaccaacaaaactctgggcccactgggggccaccgaggaagacttgggctccacattccaatgtaagctctgcaaccggacttttgcgagcaagcacgcagtcaaactgcaccttagtaagacccacggcaagtctcccgaggaccacctgatctatgtgactgagttggagaaacagtagcgtccaggtatgcaagagaccgcggaacattgcactaaacgtcgtcgagctgcactaggcctggcctgagcctctgaaatcagtctttcctttgttgctggcccgcctctctggaccttggttttcttacacatattttgtatatttatatgctctctgtccgatctgtgcatgttatttttctttttccgtgagtcaaagtctgacctttattttcaacatctgttcttggtgttaagctatcttttgtaggaaatagtggggcacactactcagagacattatttagcagtaaagaaagacacaaataacaatgataaaaagacatcctaaaatggtgaagttgccatgacaataaaggtcatagaacctggtagtgtcaaatttaaccctttgaggactgtaattgcatttctgtgcctttcacttgaaaaaaaaaaaagaagaaaaaaaggcttaaaggcatttcattcagatcaaaagctgtgtcagacacaaaacttatttaataattaaaaaatgagcttttatatgcagaactggtttgtgaggaaacatgcatgcagctgtgggaagatagaaagctgtctaggactcacggggttcggaagccacacctctacatgtctaaaacaaaaaacaacaacaacagataccccactcgccactatgcccaaaccctctggatgctgaaaaatgccactttcggcaaaaaaaaaagtatgcaagctattatttaaaaatgtgtaaaaatgctatttcttttttcctgtaaaatattgcagtttatagttatttacaaatgtaagctttggtacaagctgacctttctatagcgtgctgcattggtaaatgaaaaaaaatggggcaaacgttggagtcctttccttgtaaattgccagcatcagcttaaaaactcctgtatgttacatatcgtaccattttaatctcttcaactttctttgtaccttctggctgtatgctttctcttttaactttttatattgtcattttatattaaatttctgtgtatataatgtaaaaccacaatttttgaataaaatttagttcctgcagcttgatttggggagaggacttttactggcacctgcatctctccagatgcatgtgctgagagggactgtcanacaaaaataaatacataaaaacaaagcaagcaatgcactattaattatacattttgatgttctatcattaatattgtacagtacattttggttcacacaattaaatccactgttttctcagatgtaaaataaacccacatgcagttcttgatttacacgga

SEQ ID NO: 289 - DNA, 11076 bp, Homo sapiens
gattaaacacagtacttcatacgtttgatcatcctctgtggacactaatttcttttctaaatctaccatttctttttctttgttcaggaaagggggcatcaaaaaagcaagccaaaaggaatgctgctgagaaatttcttgccaaatttagtaatatttctccagagaaccacatttctttagtgagtaatgttgacagctatgatgttaatgtcattaagcatttcttgcagtaggaaactttccttgatttcttattctatagctacttcagagttgtgatttttagaaatctcttcattattcagttataccctaccccatttttagctgcttcctgtttgtgagtcaggatcacagaggcaattaggtaagagagcttgggagacacagtcaaattcagaataataggacgggatctaaagatgataggccagtagtgccatttttgccttcaaagtgacagcgcatttccatccctttgtttgttcattcattcacttagcaaacatttagtgagctcatactgtgtgctaagtgttgtgttgggtactggggtgcagtgaataagcagtccctgcctctaaggagtttatagactactgaaaggaaggaattctataggctagtccttacagagtgtgatgtgggaacatagaagaaggcatccaacaaaaacaggtttggagacagattccaggaagaagtaatgtctaagccaagacctgtagaatgggggaaaagaattccagagagaagaaaaagcgtgtgcaaaggccaggagtgaaacatcgtatgcagtctaggagccctaagtgatttgttgtgtgtagaacatagtgttggagggagggagtctcaatgaggccagcaaagtaaagagggattaaatcttaaagggacccctatataaggaaagtgaactttatcccaagggtagtacaaagtcattaaagaattttaatctgggaaggacaggatctagtctatacattacaaggaaatcacttggctgcattatggtaagtgagtgaaattaggatcaaagagacctgcgagagtgctgttacagaagacacgtgagacatgacagcttgaactaaggtagtggctgggaaaatggagagagatgggtagattttaaagttatttagaaaactgaggtaaaggggcatggtaattgattggatgtgggaagcaagggaaagggaggaaattactattttaaacttggcaatagcaagaggggagcagataatgaactaaatatattgaatttgaagtgcttatggaatagcttatggaatagctaagtgaatatatcgagtagctgaacaaataaattcagagcttaagagattggcctacacatgatatataacttcagattctgatattcacagataggtgtgtcatgtggtacattatctgagagtagtgtattaggtgggaaataaaaaagtacaactgtagcaacttcttcactgagcttatgataaaataagggctcattctttagaaaaaaatcaaagactatatacaaatgagtaatataatttgattttacatttttaatagaaaaatataaaacactgcatttactgcttttggaatttgagtcaacagtatcaccaaaattacaaagcacagacagatttacaggtgaaattggttaaatcttcaaagaagagatcattttcaatgctatttaaactcttttcaggcaatgtatagataacataaaggaaacttttaaatttattctccaaaaccaacataatacaccaaaacctgacaatagcaagttcaacagaaaaaaaaaaattacagatcaatatgccttatggtgaaacacctttgtaaaatgttcagtacaatattaaaataatgatatagcattgacaagtagggtttatttaactaagactatttcaaggttaataagttggttactttaattaaccacattaatgtgtcaaagagtaatatataatcctctcaatggatgccaaaaaaattttgataaaactcagcaatcattactgataaaaacttggaaaaaaaccaaaatcatggttatatatttatacattatactcattcccattaatatcagaaataaggacgcccaccaacaccacttttatttaaccttgttctagaagtacccaccaattaaaaacaaattagacaagagaaaacagtacgaagttggaaataagaggagataaaatggttactaactgcaaatggtatgattgtatccctttaaaaccctaaagaaaaactactagaaacaagagaattcatcaaggtaactgattatgaaattaatatacaaaatcaataacttttccatattgcccagagttatgtaggtaacaaccagaataattaaaaataaaaagctaaaaattattgtatctgggaaggggacctgaaggtggagaaggggcaaggcagaggttgttgcttttatacttctgtactatttgattttttgctgtatgtgtgtatcactttgacaaaacttacgaagcttcataacattggtcattttatagaaaaatagaaaatcctattctgagaaaatatactagaaaaaagtcagtagttttcttatttacaaataataactagaatatagaagatcccaatttaaattgtagacagggataggctatatgaaaataaacttagaaagaaatgcgtaggaccacgtgaggaaaagtctactaaagaatagagcagaaaacattgtaaatatatttaaatgtaatgtggtctcactcaaaacctaccagcgtttggccaggcacagtggctcacgcctgtaatcccagcactttgggaggccgaggtgggcggatcatgaggtcaggagatagaaaccattctggctaacgcggtgaaaccccgtctctactaaaaatacaaaaaaaaaaattagccgggcctggtggcgtgcgcctgtagtccccgctactccggaggctgagtcaggagaatggcatgaacccgggaggcggagcttgcagtgagcagagatccacgccactgcactccagcctaggcgacagagtgagaccccaactcgaaaaaaaaaaaaacctaccagcgttcattttggaccttgatacacgtttattgaagtttatctggaaaaaaaccctcaagaatagccaagaaaactgaaaaggaagagttgggagagcaagggtgtgctgctttactagagaacaaaacatactgtaaaactgaacttgtcagacaagttactgggccaggaatagtcagaggagcgaatagagaatccaggcgtagatgctaatccacataggaccatagtatatagcaacagtgagatttcagatcagtgggtgagaggatggattattcaataatgatgtagaaacagtttacatccacatttgggtgggggctatatatatatatttgttgatgtgtatgacatctatttagaatgcttccttattccttacaccaaagtgaatttcagatggatcaaagatttgaacataaaaatttgaaacagtataaatattaggaaacatggaagagtttttctttttaaaaatcttagcatggggaaagcattttaacttaaaacctaggttaaaagattaatacatttgacaacataaaacctactgcacagcaaaaaatctgtaaattaagacaataaaaaagtgggaagaaattattttcaacatagaactataaaggaactgttttcagtactacctttaaagctcttttgtacacatctgctgcacacagcagcacatgcctgtagtcccagctactcgggaggctaaggtgggaggactgctagagcccaagagtttgagagttaagccacacagcaagatcctaactcttaaaaaagagaaaatttaaaaagctcttatgcatcagttaaaaagacaacccagtagaagaaatgcaaacgattaagggaaaaaaagaaaaaatattcaactttattcatgcaagataaaatattttcaccttttagattggcaaaaactacaaaatttgataatagctggtattagtgagggtatgagaaaacaagccccctccaagacagttggtaggagtataaattggttcagaaatcagtttggaagtatttatcaaaattaaaagtgtacatgttctttgacttagcagttccacttctagaaataattctacagagaaactcattcaagtgcaaaagagtgtttattgctagtaaaagcaagaaactagaaacaacctaaagctcacagttggagatccgtaaggtaaatacagtgcatatatgtgcactgataaaagaaaaatgaacaagatgtagaggagtaagttatcatttgctttaaaagattgtgtgtgcttgcatatgcatagaacatttatgggaagatactgaaaaatgtttaacagtatgtctaagaaatagaacagaggtcttcagggaatgggtggtaaggaaaagagactgtactcttcattatatatttgttcttagtgcatgtatatttttaaccatgtaaatagtgttctttatttaaaaacagtattttaaagtttctataatgtaaatttttatttggtaaatctaataaattacttaattccatatcatgccatctctaaaatcttttggaaattgcctcccctctgtcgtgctcattaataaaacaatattaagagtagtaaccctacttacttcagaaagtagttgtttttattaatggcatatgaaagcaatttgagaaccataaactaatatggaaatataaggcattctaaggacagagatgaaaagggaaggatataggggaggataaaggaaagaggaaaagcagaaagaaaaaggaaaaaaatactcagttgggttctgggatagaagtctgataagaactttttgacatcctgtcatttatttgaatgacttgttcctcaaacccaacgcgcacatttcatgttttttttagtttttttttctgttttttttcctgtttgatagctgtcagttatagtgattggtatttaatacaaaaaaaaccaaagatatgaaaattgttctatattttaatctgcaaattgctccattaggcagatttaattatttgtggatttacttatggtgcttccagatatcttgtacctcttaatgtgaccatcagaaaacttgactgagaaacatttgtactatacaaaatacaaaatgctttcagtatattattgcaagtgcttcttaaaaacatatagtattgttaaatgtgtactttttaatgttgtcttgtttaaattggaaaattaaccaaatgttatccatttaaacatgctttataacatattaaatgtgagtgcttaataagtacttttaatgatactggtacgggtgttggaacccagtcctagtcaagagtctaaatcttcatctctgtttttcagacaaatgtagtaggacattctttaggatgtacttggcattccttgaggaattctcctggtgaaaagatcaacttactgaaaagaagcctccttagtattccaaatacagattacatccagctgcttagtgaaattgccaaggaacaaggttttaatataacatatttggatataggtatgatttttttttctttggctttcccaagacatgtttatttaaaaatgtgtttgaggaacaaaaatgtgtttgaggaataaaaatttctattacaatttattttattgatcagggattctaagtatatataattactaggccagtaatatatataattgatatgtcccattcttgtggatagtaataatagctaacatctatacagttataacaaaaacaacaatagcaaagatagagttttactgtgtgccagacactgttctaagattacacgtatctacttactgaatcctcagactaactctatgaagcaaattctgttatccttatttataagtaaaggaagaaaggcacagaaaggttgagaaacttgcccaagatcacatagctagtcagcggtagagcaagatttgggggaagagtcccagaagataccctggctgttaaactagccctgctgggcaaatgaaaaggcacctacatttctagcacaagtacaagtttgtggtgcccagaccttttctctctactttgtcactgtatgctgattctgggaggtaaatggaaccaagtcaatttatagttttatcccatctcagccatcatcatctgtattttctctagcccttaatcatttggatagacaaatatggacagatgggaaagcaagtcagtatggattttcttttaattcaatttatagagctaattagttgtgtgtgtttggtgtcttgattttttttttttttttttttttttgagacggagtattgtttctgttgcccaggctggagtacagtggcacaatctcaactcactgcaacctctgcctcctgggttcaagcgatcctcctgcttcagtctcccaagaagctgggaatacaggcatccaccaccaagcctggctaatttttttttttttccccaagatggagtcttgatctgttgccctggttggagtgcggtggcatgatctcagctcactgtaacctctgcctcccaggttcaagcaattctcctgcctcagcctcctgagtagctgggactactgctgtgtgccaccacacccacctaatttttgcatttttagtagagacggggtttcaccatgttggccaggctggtctcaaactcctgacctcatgatccacccacctcggcctcccaaagtttttttttttttagtagagatgggagtttcaccatgttgaccaggcttgtctcaaactcctgacctcaagtgatctgtacacctcagcctcccaaagtgctgggattacaggtgtgagccaccgtgcctggccaaagtatcttgatttaacatgtgtgagaaattttatatccctatccaaccacagaaagatgtggggaccttgcttgtcagggtcccctgaccctgggaaagtagggcacttaggggctcaaagaactcctgatattctgtgctactttgggattgaaggacgggtgaagtgcattgtctcagtaaaccaataatgatgcagaacctgggaagtcagtgcagacagatggttagaaaaggtggctgatgaaaaattagctgggtgtggtggcacatgcctgtagtccagtctactagggaggctgaggtggggacaatgacttgagcctctgaggttgaggcagcagtgagccatgatcatgccgctgctctccagcctgggtgacagagttagacttgtctcaaaaaaaaaaaagaaaagaggctggaggccaggtgcggtggctcacacctgtaatcccagcactttgggaggccaagtcgggcagatcacctgaggtcaggcgtttgagaccagcctgaccaacacggtgaaaccctgtctctactaaaaatacaaaaattagccagacaaggtggcgtgcacctgtaatcccagctactcgggaggctcaggtgggagaatcacttgaacccgggaggcagaggttgcagtgaaccgagatcgcgccactgcactccagcctgagtgacagagtgagactctgtctcaaaaaaaaaaaaagaaaaggtggctgatgagagaccattcatccaataaatatttattactgtctacagttcattgagggtttagaatacagagatgaacgacccatgtcatgaataggactatggaggatacagaatctgggggaaaaaaggaaacccaagataaatttttagattatgaattaatgatgcctctgaaacatttcttcccagttttgagaactaaatagttcttgtagatatggaaagccatctaaaaaccacagtctgttaatttggctagtttatatgcagctaccttcaaaagaacctagatattctccaaaggagatatacaaatgggctgggcaaagtggctcacacctgtaatcccacccctttgggagactgaggcatgagcatcgctggaacccaggagtttgagaccacctgggcaacatagtgagagcctgtctcaaaattttaaaattaaaaaagaaaaatgaccaaatgaccaaaaaatacatgaaaagatgctcgatatcattagtcaatagagaatgcaatcaaaaccacgataataaggtaccacttcaaatccactaggatggctatcattaatgaaatggaaaatagcaagtgttggtgatgatgtagataaactggaaccttacacgttgctggtgggaatataaaacagttcagcctccatggaataagcttctcagttcctcaaatgaattgccatatgacccagcaactccactcctaggagtataaataaaaaactggtatttaaacaaatgcctatacacacaggtatctgtatattcatagcagcaccattcacaaaagccaaaaggtagaaacagcccaaaacatccatcagtgaataagtggataaacaaattgtggactgtccttccaatgaaatattattcagctgtaaaaagaaacgaagttctgatacattctacaacatggatgagcctcaagcagaagctggagggtcaggagaaaagaacctagatactagaactagaaagcctctttactcattaaataatcccattgtatctggatattttccactaaatagagtatcaaaaataacatttttattatgcctacttcaaataaatcataccgcacacgtttctatttcttcctctttgccctcatttcagccatctttagtaagagtggctcatcagttgatgggaagaacgtttgtttcctgggtcaggtattgtttttaaaataccatgacccatttacagtataaataaagaactagactctgcacagacttaaaacctaggaacatgaatggacaacagcataaatacatacaattattatgtatcaattaaacatttttttttaatagaagacacaagggaggttttgccttgaccgaagttattcctggttcaaatgcctcctgaaaatgacttcctagtggaaaatacaatctctccagtcctctagcaaatggttctttcccttttgagaaagttactgtgtggttcagtaatttccaaatagtgttcaactaactatattagaattgccttgggagctgttatttttttaagtgtaggaatcagccacccccaactgtatatttctgattgagtgagctagagtgcagcctagatatctgtatgtctttaacactgtcagatcattatgaagtgtaatgtgtttgaaaactgctacagctgagcagttgtggttttttgtttgtacaagcaaaacaaagattgcgagtggtgtagtataccatggaggcttaaaaagaaagacaataataagaattgtattgtttttacaaagggatccactttatacatattggacattaatcgtcatccttgaatgtgtcattacagatgaactgagcgccaatggacaatatcaatgtcttgctgaactgtccaccagccccatcacagtctgtcatggctccggtatctcctgtggcaatgcacaaagtgatgcagctcacaatgctttgcagtatttaaagataatagcagaaagaaagtaaatctggagcaacttaaaaaatctttcagtagcacataaaaagttcccctctggccccttcccaagtaaaacttttaccgtagtgtttatgtcttgtttctaaatctcttcatagattccatcaacactccagatttaattatctcctcatagttgttattaagctctttttaatggcttcaactttgtatcagtatactgtatttataaactttgtaccacaagagagagtgtagcacccattttacagtgccatgcacatcagagaaagaaactgcatgtttgttgttgatgatgaaataaaaatgctagcgacagtctttcttactggtgcttaagctcttctttgcacaaagctttataaagggaattcaaaggaagccctttagaattagagtcttgagggacagcactaacaggcctttattaagtatgattgattgttaaatttcagggaacatgattggtctgctgtgtatttgaattcatgtaacaaagaactgttacgatgggattctgctcattttattaaaaagctactgacttgactgtcatcctgttcttgttagccattgtgaataagattttaatgttgataattctgttatttacatatctctaatttactttgaaattcaaaggtgaaaataaaaaatgatggcctaagtaaaatttacaaacatacatgtaatgggttacttccttactttctctaagcgtatgcaaccttgtatttttctttgacataaccatacacaggtgaattactagtttaaaaagcatttgaccatgcatgttggctcatgcctataatcccaactctttcggaggccaaggtgggaggatcccttgaggccaaaagtttgagaccagcctgggcaacatagtgagtccccatctctaccaaaaagaaaatcaggtgtggtggcacactttgagtcccagctactcaggaggctgaggtgggaggattgcttgggcccagaagatcaaagctgcagtgagctaggatcacagcactgcactccagcctgggtgacagagtgagaccctgtctcaaaaaaaaaaaaaaaaaaaaaaaaaaaaagcgttagtagaattacccaaaaaaccttcccagcttattcagttcagttgcaagaatgttccaaagtgatgagtgattaaaaggttaggaaataagtctaatgaacagattttaaccttaccttttgtgtttccatatataatcttgtaacatctcaagtcttccatctgtcagcgccggctcgtgctagctttctacattaggtggaagtctcagctctgtgtttggagtgcagggaaagcttcatagaggaaacatgaatgaaggtaggtctcatgtattcatacagaagga

SEQ ID NO: 290 - DNA, 20444 bp, Homo sapiens
cgcaagcaggaggcgggggagtcggaggaggtggcggcgctggagctcctcccggggaccagcgacccggggagcgagcacgtcgctccgcaccgctcttcctccagccgctgagccgtcccttctcgccatgtcccagagcaggcaccgcgccgaggccccgccgctggagcgcgaggacagtgggaccttcaggtcagcgtgcgggcagtcagggccccagggccgggagcgttgggcggcagggccggggcgcggggagccggccctccagaggcattctgggtaaagccgtgcccggcgcccacgcctccgcggctgtgggtgctcggccccgccctctcggcggcgagggttggggtctgcggccgggccccgcccctctcgtggtccctggcggcgcgcggggcgggcggaggtgacgctcggtcggcgcgcccgggaagggatcgtcaggttttccctgagaggctgcggcgctgctgccagccctgttctgttgagaatctctcctacccgcattcaagtgctctctctaaagacctcgctcaccccgcctgctcctgcggagtgactgccgcagcggggccggaagacaggtgcgccccagcctcgccagctctggccctggcctccggggaactcggcgcctccctcgtcaccgtcggtggcggttaaaactggcctctacgcttctgcttcaatctccaatttggcatgcaaagcacacctttttgtggtttttgcagtttggggaagatgataacagctaagccagggaaaacaccgattcaggtattacacgaatacggcatgaagaccaagaacatcccagtttatgaatgtgaaagatctgatgtgcaaatacacgtgcccactttcaccttcagagtaaccgttggtgacataacctgcacaggtctgtatacacagttaacctggatgaccgagtgggttggcagtcaatacttggtgttgcttttcagttcggaaaagttctctttttgccagacagctgtgaggaacaggctctgaaactgagacctctcatctcaggtcgttagggcttttcagctgcatctgattctcttcctaattttctcttccccacataccaaggaagcttagaaactaaaaagttacccagccggatggctggatcctgcatggctcttctcataccctaggatcctcctagggttcttcttagaattagagggaagcaggaaaggttcttggagcagtcatagctgggtcagtaggtactgtgaagtttcatagattatagcggatgccaggaggcatgaccccagaattttctgagcgtctctcctctctgtatggactcatttggcactttaggtccattgtgctacttttgattctgtatccaaacaaaatgaggaaggggagaaggtcctcatatattacataataacttctagtttttgaaactgaacagatattttgtatattatccactttttaaacaagaagaaacaggttcagagagattataagtaacatgcgtatagcaatgaagtcacaaagcaatgaaattttaaagttcatgctttcttttggtctgtgagcttgagcaaatgataactaaagttgctcatttgtaaatgtggacattatttttcttatgtatctatttaattgcaaacacagaaaacattggatgctaaatttaatttggaagaatgccaagaaaaaaatttagtaggaaggctcaagttctaccatctggaaaatctgaagacagcatttgtttgtgtccctggaagtttggagtcttttattttaattgatgccactttaagaaaagtttaaaactttttgtgtgaggcagttagattgtaggtgctggccggaagggtccccatgggaaccatagagtcaacactgcattacttactttagctagtctatttctagataggaagaattcaagaaaagggagggtttttccctctcaatgtgttttagaccccaaattaacaacctatggcaaccgttctgcctacgccctcttctcacactaccatggcttcctgtgcaagcttatctgcctccatggcttctgatactgtctaaagactaatattctgaaatgtctgtctacatcccaagcccagttacagaatagtgtatcagtctgtgcttgctgagcatctttgcctggatgacacagaggcccctcaagcctctcattgtcccaaactgaatccatcttttccctcaaacccattcttcttgcattccctttctatgtaaaggctccacaatcacctagttcagtagaaatgtaggcttttgtcttcctaactacttcccgtctttctccctcttgtccagtctgttattaaactctatccattggcgtttaataatccactaactatccattgaatctgtcggcttctctcttctggccattgctactgcctaggccaccatcatctctcacttggattgtagctgcagtcttgtagctacacgtttaccttctagtcttgtgatgtccttttgtcacattacaaccagtgttcattcttttttttttgagacagggtctcactctgtcacccaggctagagtgcagtggcatgatcttggctcactgcaacctccgctacagcctgcacttaggcttgttgtaacatatcccattccatacttcaggtgcctattaacagacaaaaatcccacactactctgttggctcttgagggcagggaccctgtatgctatatccctaatacctgtgttagcagataaatatatggtttctgtgtcttcttacacttgagggccacacttgaaggccacacttgaaacttattccatgagggtatgggagtttgaacttaaaaggaaaaagatggaatttatcatttgccattgtgattgcttactgaaattagacatcagtcttatccccagtcccaacttagctacccatgcagaagatacagaccgtccagaagatacataacaagctgtcaccttattccataaaactctttcctgttgtacccaacacataatcatgactgctcagcctagcaaagcagtttgatacgttataggacaggctgtcagaataaaattatgcacattttgctatcaaacaattctgctgtaaatggttcctttaaaagaaacttcttgctgcagaagaatttcccctccaggaataaaggaagagtaaaatactaatctgcatttcttcagaggtgtgacacggtctactttattaccatgttatataataaacatatataatgtagaaataaggatttttatgcaggtatgcatagaattatatagaactttaaaaagttattttttaaaattttttcacatggtgaatattttattacagtatataaccatgtagtatataacatgtacatatttttatgtacagtatataacgtacatatttttattacctagtatgtgtatgtaaaatctatagtgactttgttttgtgtattgaaaacatctttgtaagctgcacatttttgtgggagataaagacttctttttttaaatcttaattcaggtgaaggtacaagtaagaagctggcgaaacatagagctgcagaggctgccataaacattttgaaagccaatgcaagtatttggtgagctaaatttctttgtattcagcagctcaaaaatatcatggctgaggtaagattaaaaatttgaacatgcttacaaaagcaacaaagtgaacagttgttagcatcctacctctcaaattctatttccttatgaaaacttatcatccattaaagaaaactttatccaatcaaatccagcaattagctattaaatgaaggtgctcatgaactaggctttactgtttttttttttttaatgggatacaacagtagaaaatcagtgcttcttgcaaatattaatattaacattttgtatttagactttgattatttctacattgaagaaaacaaagtgtgagatggagaaagatccactaaaagtactcttttgggaattctaattttgaagaagcaggcagaggttttcttttattatataatgtataccaaaagaagagaatgttaagtgggatattaattcttgacatatctttctaaagtaagatttttttttttttttttttttttttgagacggagtctcgctctgtcgcccagtctggagtgcagtggcgggatctcggctcactgcaagctccgcctcccgggttcacgccattctcctgcctcagcctcccaagtagctgggactacaggcgcccgccactacgcccagctaattttttgtatttttagtagagacggggtttcaccgttttagccgggatggtctcgatctcctgacctcgtgatccgccagcctcggcctcccaaagtgctgggatagattttttactactttaggtgtttctagatagaatattggtcctggagcatctcacatattaaagtagtgtccactgggtgcactctggagcttggcatgctttcaagttcttcttgtgcatacacttacatatgcctgaagtacgatctgtgtaatcagcttatagttgacagtagagacccagggaatttgggatgggttttttgttccctagtcatagaaaggcttttggattaggggtgtagttaggttctcatgtagtattcctctctttttgtaaatcattctaaaccgtttgggtagtttagaactaaccagtgacatggcaaccctctagataagcagctgcccaagacaagccttgcatttcacaagatgatgcttgattctctagggtcatgcattataattgatctatgccaggctgggcggggtggctcacgcctgtaatcccagcactttgggaggctgaggtgggtggatcacttgaggccaggagttcaagaccagcctggccaacatggcaaaaccctgtctctactaaaaatacaaaaattagccaggcatggtggcaggcgcctgtaatcccagctacttgggtggctgaggcacaaaaatcgcttgaacccgggaggcggagattgcagtaagctaagattgtgcccctgcactccagcctgtgaaaccctgcctcaaagaaaaacaaggccaggcatggtggctcacacctgtaatcccagcactttgggaggccaaggtgggcagatcacttgagtcaggagttcgagaccagcctggccaacatggtgaaacctcgtctctactaaaaatacaaaaaattagccgagtgtggtggcacgctcctgtaatcccagctgcttgggaggctgagacacgagaattccttggacccagtaggcagtggttgcagtgagctgggatcgcgccattgcactccagcctgggcgacagagcaagactctgtctccaaacaaacaaaaaaaagacatgccaaatgacatggcaggtattgggttctcccccactggtgatggccatgctgtttctgtatagcctgaaggtgaacccaaccattaagtacatttgtagaaatgaggggtatggagtgtcctttctgcatcttggcactttgtcagcaaaaaaagctaacaaactttactatatttgtgcttcttgacagataaaatgggaattactaagctgtaatcaggcctaaagtggcctgacttaatacagagactttctcacttctccatcacaattatttgggtagcttcggcatgcagcattgtaagtgaatactcatatctcatcagcctatgtaaagcttgaaattctcacagttggaaaaaaaaaaccttgaggaagtggcaataactaaacctcatttgtcatggaaaaatgactccagttgcctaggtggtactaaccttgaaatgccgcttattcagttttaagtactgacctgctaagtaactagtaattccagactccctagaagaggttgttctctttttccctaatcataatccccacttgctaaaaccaaattcatctaagccatctattttctgcaggatacatgtaaatcttagaggattatcccagcactgagcagatgatagatcaaacagatctctcttcatagttctgtggatgaaaaaacagtatttacacataatctgtattattcacattgccaggctaaattttctggatcattgttactcttctgttttttgtatagttgtaacagagtattctttaaatacatttttatggcatgcctattatgtacaaaacaccacaaagcttatgtaggtaagtgatacataggccctacctcaaggagcttactgtctgaacaggggagaggtgtggtgaaggatggacaaattatatgtatttgtaagagtatataatttatggtaaaacaatttcaagaaaggattaaaccatgtgttataatgtttcaaagaagggagagattataaaccactggggtaaaaggataggcttcttggaggaagtgacatttgagatatatcttggatgaccgatcagattcccatagaagaggtctgagaaaagggcattccatgtagaaggaatgacaagagcaaagacatagagagttaattagaaaatgcttgtcatttatttcataattcgggggaaattattttgttttataacacttttaaaaaatatttagctttgcagttcctgaccccttaatgcctgacccttccaagcaaccaaagaaccagcttaatcctattggttcattacaggtaagttgtacagttctttgcctactgatgaaatatataataagtttgtaatgtcagaggggctaacacaaggaattaatattttaaagacaagatagtgatatattttgttttccaacttacgatcattagattaacagagctaacttgaaattattttcctatttatgttctgggttttctttcatatacagtatttgcctttggcttatagaattctcatttaagatcaacaggccctcagtgcacatgggtaaagtgttttatactttaagaatagttcttgctactcttgtgacaaatctctttctacttctgttgagacagaagactttatagagagcctaaatcaaatcagtgaacctaactgaagaaaaggagtctatttgcttattctaccaaaaaaaaaaaattttatctatacacacacaaacacacacacatatattcagctttgaatttctatatgcagaatatccttcttgcagattatccatgtgctctgttaggccatttccctccccattattcagccagtcctttggtctccttttcctgcacagtgagcttttctatagttttcttcaccttctgtcccccactttatgcaagtctgttgtttgctgtccctactcctcatgtgttcttggccagctgtgggtttggaagtctatagctaggaggggagggactttaggaactgatggcagtgaaacctgtagatggtctcctctggtgttgccaaagagggcggtagtagcctgtttttctagttgatgtctgataccagctcactgtggtttaatgcaagaacaccattcgtagcacaaaactgcttcagttttggtattggggtataaaaatataaaatgcgggaatgtctttgagaaatagagggtcttccctcttttttctgttgcagaatatcactattcttttcaaacatatacatagaaatgggatcaaaattaagaaaacacttatgtgattgagccattgcataaaattactattaaagcctcatcttgattttataggaattggctattcatcatggctggagacttcctgaatataccctttcccaggagggaggacctgctcataagagagaatatactacaatttgcaggctagagtcatttatggaaactggtacttatttcttacaattaaaggcatttgaaatattttcagatgatgaatgactatcgaaatttctgtcgtaatgttttcaaatatttctatgcagaaaaattgatacactcctcttttattgtctctgactttctgaggttgaacttaagtataaatatttggcttaagatacttagtcttcttaatttgatatttttaaaaatcatagattattaatagaaagacaaactgttggctctgtactttaaacagtcttcattgataaattactgacttaaaaaacctcaatttggagaaaaagctatagtaaatctcttggattttaacagctattctatctagaaaataggactagaggaagattacacttgaaaattatatgattaataagagactacatggcaaataattgcagtgagataaaaatgaaaattatctttcttaattatagcaacttctatgttataaaggatataaactataagaaacgctgtcactttaaaaagtactagcgagaattcctgttaacttctctggcatgtttttgttattttcaaaagtggcttaaaatgggattttagcttagctagataatagtttcaagtaataagaaactatttgcctttgggaggtagtgtggccagtacagaaagcaccaggccaaaagcaggaacctcagcttccgtccttgatgcagtccttgattcgcgaagttaagcaaattacttaatttctctggacctcagttttttaatctataaaacaaaagcatggaggtagatatttatggtatctttcaactccaccatcccctgtgcctttcttattcctgttaaaaggaatttcatataatcgtcagtttagagaagatcataagcaggaaatagacattgagagagaggagttataattcagatgtattttaataaatctaaataattggtcagaattaaaccaaatatggttcagtaatgctagacataggaaaatacaattattatagaaaaacagaaagcataactattaaagaaaaacttaaaacaaatgtcttcaaaagtgtaagaattagtaactatacaggcctggcacagtggctcacactgataatcccagccctttgggaggctgaggtgggccgatcatatgaggtaaggagtttgagaccagcctggccaacatggcaaaaccctgtctgtactaaatacaaaaaatcagccaggtgtggtggtgggcacctgtaatcccatctacttgggaggctgaagcaggagaattgcttgaacccaggaggcggaggttgcagtgagccaagatggtgccactgcactccagcctggtgacaaagtgagggtccgtctcaaaaaaaaaaaaaaaaagaattaatagctatacaaacaaaatagcataacaaacaaagttatcaggtcagtaagaacatagtctagtatataataaaaaccgtgaggttctctgattaaacacagtacttcatacgtttgatcatcctctgtggacactaatttcttttctaaatctaccatttctttttctttgttcaggaaagggggcatcaaaaaagcaagccaaaaggaatgctgctgagaaatttcttgccaaatttagtaatatttctccagagaaccacatttctttagtgagtaatgttgacagctatgatgttaatgtcattaagcatttcttgcagtaggaaactttccttgatttcttattctatagctacttcagagttgtgatttttagaaatctcttcattattcagttataccctaccccatttttagctgcttcctgtttgtgagtcaggatcacagaggcaattaggtaagagagcttgggagacacagtcaaattcagaataataggacgggatctaaagatgataggccagtagtgccatttttgccttcaaagtgacagcgcatttccatccctttgtttgttcattcattcacttagcaaacatttagtgagctcatactgtgtgctaagtgttgtgttgggtactggggtgcagtgaataagcagtccctgcctctaaggagtttatagactactgaaaggaaggaattctataggctagtccttacagagtgtgatgtgggaacatagaagaaggcatccaacaaaaacaggtttggagacagattccaggaagaagtaatgtctaagccaagacctgtagaatgggggaaaagaattccagagagaagaaaaagcgtgtgcaaaggccaggagtgaaacatcgtatgcagtctaggagccctaagtgatttgttgtgtgtagaacatagtgttggagggagggagtctcaatgaggccagcaaagtaaagagggattaaatcttaaagggacccctatataaggaaagtgaactttatcccaagggtagtacaaagtcattaaagaattttaatctgggaaggacaggatctagtctatacattacaaggaaatcacttggctgcattatggtaagtgagtgaaattaggatcaaagagacctgcgagagtgctgttacagaagacacgtgagacatgacagcttgaactaaggtagtggctgggaaaatggagagagatgggtagattttaaagttatttagaaaactgaggtaaaggggcatggtaattgattggatgtgggaagcaagggaaagggaggaaattactattttaaacttggcaatagcaagaggggagcagataatgaactaaatatattgaatttgaagtgcttatggaatagcttatggaatagctaagtgaatatatcgagtagctgaacaaataaattcagagcttaagagattggcctacacatgatatataacttcagattctgatattcacagataggtgtgtcatgtggtacattatctgagagtagtgtattaggtgggaaataaaaaagtacaactgtagcaacttcttcactgagcttatgataaaataagggctcattctttagaaaaaaatcaaagactatatacaaatgagtaatataatttgattttacatttttaatagaaaaatataaaacactgcatttactgcttttggaatttgagtcaacagtatcaccaaaattacaaagcacagacagatttacaggtgaaattggttaaatcttcaaagaagagatcattttcaatgctatttaaactcttttcaggcaatgtatagataacataaaggaaacttttaaatttattctccaaaaccaacataatacaccaaaacctgacaatagcaagttcaacagaaaaaaaaaaattacagatcaatatgccttatggtgaaacacctttgtaaaatgttcagtacaatattaaaataatgatatagcattgacaagtagggtttatttaactaagactatttcaaggttaataagttggttactttaattaaccacattaatgtgtcaaagagtaatatataatcctctcaatggatgccaaaaaaattttgataaaactcagcaatcattactgataaaaacttggaaaaaaaccaaaatcatggttatatatttatacattatactcattcccattaatatcagaaataaggacgcccaccaacaccacttttatttaaccttgttctagaagtacccaccaattaaaaacaaattagacaagagaaaacagtacgaagttggaaataagaggagataaaatggttactaactgcaaatggtatgattgtatccctttaaaaccctaaagaaaaactactagaaacaagagaattcatcaaggtaactgattatgaaattaatatacaaaatcaataacttttccatattgcccagagttatgtaggtaacaaccagaataattaaaaataaaaagctaaaaattattgtatctgggaaggggacctgaaggtggagaaggggcaaggcagaggttgttgcttttatacttctgtactatttgattttttgctgtatgtgtgtatcactttgacaaaacttacgaagcttcataacattggtcattttatagaaaaatagaaaatcctattctgagaaaatatactagaaaaaagtcagtagttttcttatttacaaataataactagaatatagaagatcccaatttaaattgtagacagggataggctatatgaaaataaacttagaaagaaatgcgtaggaccacgtgaggaaaagtctactaaagaatagagcagaaaacattgtaaatatatttaaatgtaatgtggtctcactcaaaacctaccagcgtttggccaggcacagtggctcacgcctgtaatcccagcactttgggaggccgaggtgggcggatcatgaggtcaggagatagaaaccattctggctaacgcggtgaaaccccgtctctactaaaaatacaaaaaaaaaaattagccgggcctggtggcgtgcgcctgtagtccccgctactccggaggctgagtcaggagaatggcatgaacccgggaggcggagcttgcagtgagcagagatccacgccactgcactccagcctaggcgacagagtgagaccccaactcgaaaaaaaaaaaaacctaccagcgttcattttggaccttgatacacgtttattgaagtttatctggaaaaaaaccctcaagaatagccaagaaaactgaaaaggaagagttgggagagcaagggtgtgctgctttactagagaacaaaacatactgtaaaactgaacttgtcagacaagttactgggccaggaatagtcagaggagcgaatagagaatccaggcgtagatgctaatccacataggaccatagtatatagcaacagtgagatttcagatcagtgggtgagaggatggattattcaataatgatgtagaaacagtttacatccacatttgggtgggggctatatatatatatttgttgatgtgtatgacatctatttagaatgcttccttattccttacaccaaagtgaatttcagatggatcaaagatttgaacataaaaatttgaaacagtataaatattaggaaacatggaagagtttttctttttaaaaatcttagcatggggaaagcattttaacttaaaacctaggttaaaagattaatacatttgacaacataaaacctactgcacagcaaaaaatctgtaaattaagacaataaaaaagtgggaagaaattattttcaacatagaactataaaggaactgttttcagtactacctttaaagctcttttgtacacatctgctgcacacagcagcacatgcctgtagtcccagctactcgggaggctaaggtgggaggactgctagagcccaagagtttgagagttaagccacacagcaagatcctaactcttaaaaaagagaaaatttaaaaagctcttatgcatcagttaaaaagacaacccagtagaagaaatgcaaacgattaagggaaaaaaagaaaaaatattcaactttattcatgcaagataaaatattttcaccttttagattggcaaaaactacaaaatttgataatagctggtattagtgagggtatgagaaaacaagccccctccaagacagttggtaggagtataaattggttcagaaatcagtttggaagtatttatcaaaattaaaagtgtacatgttctttgacttagcagttccacttctagaaataattctacagagaaactcattcaagtgcaaaagagtgtttattgctagtaaaagcaagaaactagaaacaacctaaagctcacagttggagatccgtaaggtaaatacagtgcatatatgtgcactgataaaagaaaaatgaacaagatgtagaggagtaagttatcatttgctttaaaagattgtgtgtgcttgcatatgcatagaacatttatgggaagatactgaaaaatgtttaacagtatgtctaagaaatagaacagaggtcttcagggaatgggtggtaaggaaaagagactgtactcttcattatatatttgttcttagtgcatgtatatttttaaccatgtaaatagtgttctttatttaaaaacagtattttaaagtttctataatgtaaatttttatttggtaaatctaataaattacttaattccatatcatgccatctctaaaatcttttggaaattgcctcccctctgtcgtgctcattaataaaacaatattaagagtagtaaccctacttacttcagaaagtagttgtttttattaatggcatatgaaagcaatttgagaaccataaactaatatggaaatataaggcattctaaggacagagatgaaaagggaaggatataggggaggataaaggaaagaggaaaagcagaaagaaaaaggaaaaaaatactcagttgggttctgggatagaagtctgataagaactttttgacatcctgtcatttatttgaatgacttgttcctcaaacccaacgcgcacatttcatgttttttttagtttttttttctgttttttttcctgtttgatagctgtcagttatagtgattggtatttaatacaaaaaaaaccaaagatatgaaaattgttctatattttaatctgcaaattgctccattaggcagatttaattatttgtggatttacttatggtgcttccagatatcttgtacctcttaatgtgaccatcagaaaacttgactgagaaacatttgtactatacaaaatacaaaatgctttcagtatattattgcaagtgcttcttaaaaacatatagtattgttaaatgtgtactttttaatgttgtcttgtttaaattggaaaattaaccaaatgttatccatttaaacatgctttataacatattaaatgtgagtgcttaataagtacttttaatgatactggtacgggtgttggaacccagtcctagtcaagagtctaaatcttcatctctgtttttcagacaaatgtagtaggacattctttaggatgtacttggcattccttgaggaattctcctggtgaaaagatcaacttactgaaaagaagcctccttagtattccaaatacagattacatccagctgcttagtgaaattgccaaggaacaaggttttaatataacatatttggatataggtatgatttttttttctttggctttcccaagacatgtttatttaaaaatgtgtttgaggaacaaaaatgtgtttgaggaataaaaatttctattacaatttattttattgatcagggattctaagtatatataattactaggccagtaatatatataattgatatgtcccattcttgtggatagtaataatagctaacatctatacagttataacaaaaacaacaatagcaaagatagagttttactgtgtgccagacactgttctaagattacacgtatctacttactgaatcctcagactaactctatgaagcaaattctgttatccttatttataagtaaaggaagaaaggcacagaaaggttgagaaacttgcccaagatcacatagctagtcagcggtagagcaagatttggggaagagtcccagaagataccctggctgttaaactagccctgctgggcaaatgaaaaggcacctacatttctagcacaagtacaagtttgtggtgcccagaccttttctctctactttgtcactgtatgctgattctgggaggtaaatggaaccaagtcaatttatagttttatcccatctcagccatcatcatctgtattttctctagcccttaatcatttggatagacaaatatggacagatgggaaagcaagtcagtatggattttcttttaattcaatttatagagctaattagttgtgtgtgtttggtgtcttgattttttttttttttttttttttttgagacggagtattgtttctgttgcccaggctggagtacagtggcacaatctcaactcactgcaacctctgcctcctgggttcaagcgatcctcctgcttcagtctcccaagaagctgggaatacaggcatccaccaccaagcctggctaatttttttttttttccccaagatggagtcttgatctgttgccctggttggagtgcggtggcatgatctcagctcactgtaacctctgcctcccaggttcaagcaattctcctgcctcagcctcctgagtagctgggactactgctgtgtgccaccacacccacctaatttttgcatttttagtagagacggggtttcaccatgttggccaggctggtctcaaactcctgacctcatgatccacccacctcggcctcccaaagtttttttttttttagtagagatgggagtttcaccatgttgaccaggcttgtctcaaactcctgacctcaagtgatctgtacacctcagcctcccaaagtgctgggattacaggtgtgagccaccgtgcctggccaaagtatcttgatttaacatgtgtgagaaattttatatccctatccaaccacagaaagatgtggggaccttgcttgtcagggtcccctgaccctgggaaagtagggcacttaggggctcaaagaactcctgatattctgtgctactttgggattgaaggacgggtgaagtgcattgtctcagtaaaccaataatgatgcagaacctgggaagtcagtgcagacagatggttagaaaaggtggctgatgaaaaattagctgggtgtggtggcacatgcctgtagtccagtctactagggaggctgaggtggggacaatgacttgagcctctgaggttgaggcagcagtgagccatgatcatgccgctgctctccagcctgggtgacagagttagacttgtctcaaaaaaaaaaaagaaaagaggctggaggccaggtgcggtggctcacacctgtaatcccagcactttgggaggccaagtcgggcagatcacctgaggtcaggcgtttgagaccagcctgaccaacacggtgaaaccctgtctctactaaaaatacaaaaattagccagacaaggtggcgtgcacctgtaatcccagctactcgggaggctcaggtgggagaatcacttgaacccgggaggcagaggttgcagtgaaccgagatcgcgccactgcactccagcctgagtgacagagtgagactctgtctcaaaaaaaaaaaaagaaaaggtggctgatgagagaccattcatccaataaatatttattactgtctacagttcattgagggtttagaatacagagatgaacgacccatgtcatgaataggactatggaggatacagaatctgggggaaaaaaggaaacccaagataaatttttagattatgaattaatgatgcctctgaaacatttcttcccagttttgagaactaaatagttcttgtagatatggaaagccatctaaaaaccacagtctgttaatttggctagtttatatgcagctaccttcaaaagaacctagatattctccaaaggagatatacaaatgggctgggcaaagtggctcacacctgtaatcccacccctttgggagactgaggcatgagcatcgctggaacccaggagtttgagaccacctgggcaacatagtgagagcctgtctcaaaattttaaaattaaaaaagaaaaatgaccaaatgaccaaaaaatacatgaaaagatgctcgatatcattagtcaatagagaatgcaatcaaaaccacgataataaggtaccacttcaaatccactaggatggctatcattaatgaaatggaaaatagcaagtgttggtgatgatgtagataaactggaaccttacacgttgctggtgggaatataaaacagttcagcctccatggaataagcttctcagttcctcaaatgaattgccatatgacccagcaactccactcctaggagtataaataaaaaactggtatttaaacaaatgcctatacacacaggtatctgtatattcatagcagcaccattcacaaaagccaaaaggtagaaacagcccaaaacatccatcagtgaataagtggataaacaaattgtggactgtccttccaatgaaatattattcagctgtaaaaagaaacgaagttctgatacattctacaacatggatgagcctcaagcagaagctggagggtcaggagaaaagaacctagatactagaactagaaagcctctttactcattaaataatcccattgtatctggatattttccactaaatagagtatcaaaaataacatttttattatgcctacttcaaataaatcataccgcacacgtttctatttcttcctctttgccctcatttcagccatctttagtaagagtggctcatcagttgatgggaagaacgtttgtttcctgggtcaggtattgtttttaaaataccatgacccatttacagtataaataaagaactagactctgcacagacttaaaacctaggaacatgaatggacaacagcataaatacatacaattattatgtatcaattaaacatttttttttaatagaagacacaagggaggttttgccttgaccgaagttattcctggttcaaatgcctcctgaaaatgacttcctagtggaaaatacaatctctccagtcctctagcaaatggttctttcccttttgagaaagttactgtgtggttcagtaatttccaaatagtgttcaactaactatattagaattgccttgggagctgttatttttttaagtgtaggaatcagccacccccaactgtatatttctgattgagtgagctagagtgcagcctagatatctgtatgtctttaacactgtcagatcattatgaagtgtaatgtgtttgaaaactgctacagctgagcagttgtggttttttgtttgtacaagcaaaacaaagattgcgagtggtgtagtataccatggaggcttaaaaagaaagacaataataagaattgtattgtttttacaaagggatccactttatacatattggacattaatcgtcatccttgaatgtgtcattacagatgaactgagcgccaatggacaatatcaatgtcttgctgaactgtccaccagccccatcacagtctgtcatggctccggtatctcctgtggcaatgcacaaagtgatgcagctcacaatgctttgcagtatttaaagataatagcagaaagaaagtaaatctggagcaacttaaaaaatctttcagtagcacataaaaagttcccctctggccccttcccaagtaaaacttttaccgtagtgtttatgtcttgtttctaaatctcttcatagattccatcaacactccagatttaattatctcctcatagttgttattaagctctttttaatggcttcaactttgtatcagtatactgtatttataaactttgtaccacaagagagagtgtagcacccattttacagtgccatgcacatcagagaaagaaactgcatgtttgttgttgatgatgaaataaaaatgctagcgacagtctttcttactggtgcttaagctcttctttgcacaaagctttataaagggaattcaaaggaagccctttagaattagagtcttgagggacagcactaacaggcctttattaagtatgattgattgttaaatttcagggaacatgattggtctgctgtgtatttgaattcatgtaacaaagaactgttacgatgggattctgctcattttattaaaaagctactgacttgactgtcatcctgttcttgttagccattgtgaataagattttaatgttgataattctgttatttacatatctctaatttactttgaaattcaaaggtgaaaataaaaaatgatggcctaagtaaaatttacaaacatacatgtaatgggttacttccttactttctctaagcgtatgcaaccttgtatttttctttgacataaccatacacaggtgaattactagtttaaaaagcatttgaccatgcatgttggctcatgcctataatcccaactctttcggaggccaaggtgggaggatcccttgaggccaaaagtttgagaccagcctgggcaacatagtgagtccccatctctaccaaaaagaaaatcaggtgtggtggcacactttgagtcccagctactcaggaggctgaggtgggaggattgcttgggcccagaagatcaaagctgcagtgagctaggatcacagcactgcactccagcctgggtgacagagtgagaccctgtctcaaaaaaaaaaaaaaaaaaaaaaaaaaaaagcgttagtagaattacccaaaaaaccttcccagcttattcagttcagttgcaagaatgttccaaagtgatgagtgattaaaaggttaggaaataagtctaatgaacagattttaaccttaccttttgtgtttccatatataatcttgtaacatctcaagtcttccatctgtcagcgccggctcgtgctagctttctacattaggtggaagtctcagctctgtgtttggagtgcagggaaagcttcatagaggaaacatgaatgaaggtaggtctcatgtattcatacagaagga

SEQ ID NO: 291 - DNA, 521 bp, Homo sapiens
ccattaagtgataagtgactttaaaagatgaggatggcaatagcacaatatgataatactaattcaataagttattgagcactaatgtgcccagcactatagcagcctctgggaatatgtgggcccatattgtgttatttgatgaagagccgctcccttgttctcggggtgtgctgtgatatgccacacagtccccttccctacagaggattttgttttctcgctctggcagtgtgcacccaacggccctcagctgtcagtagaattgccctcttaagtgaaaagagccacctcatctgaagtcacacttccttcttgggccaggctgcatgcaaagactagtcccattgccccatattagaacaatctgaaagaccatcctagcttcagagttccccttagtgtcagctaaggccacctttgagattgcatcatagtccatattcttcctccacccagtggagtttcctttctttccacaggtggcaatccaaatctcctacccactaatcttcatctca

SEQ ID NO: 292 - DNA, 564 bp, Homo sapiens
aaattacttaatttctctggacctcagttttttaatctataaaacaaaagcatggaggtagatatttatggtatctttcaactccaccatcccctgtgcctttcttattcctgttaaaaggaatttcatataatcgtcagtttagagaagatcataagcaggaaatagacattgagagagaggagttataattcagatgtattttaataaatctaaataattggtcagaattaaaccaaatatggttcagtaatgctagacataggaaaatacaattattatagaaaaacagaaagcataactattaaagaaaaacttaaaacaaatgtcttcaaaagtgtaagaattagtaactatacaggcctggcacagtggctcacactgataatcccagccctttgggaggctgaggtgggccgatcatatgaggtaaggagtttgagaccagcctggccaacatggcaaaaccctgtctgtactaaatacaaaaaatcagccaggtgtggtggtgggcacctgtaatcccatctacttgggaggctgaagcaggagaattgcttgaac

SEQ ID NO: 293 - DNA, 521 bp, Homo sapiens; identical to SEQ ID NO: 291

SEQ ID NO: 294 - DNA, 588 bp, Homo sapiens
gcgtgagccaccgcgcccgcccataaatcacttttaataatatcctttcgtacgaatagcattgtgcaagcaatcttccataacaccgagtaagcacaggggagcatttctgctagtgcctagcaagcccctggagaagcgacacgtcatctaatggcccaccaaaggtgctgcatcccaggcaaacgccattacaaccgactacccaggtccccggaaaggccttcgtttactcctaacgtgttttgctgggatgcactgacccagcgttccatctcgcgacgaaagcccagaagacaaaggagcccgcccggcgggagaggagcgggtgtttggacgtccccgcgtgttcctaaacacagggctcggggacccgaagagcgcaccgcagccccctggagcgtatatatccggggtctcaagcttcaggaccaggcccgggagactccctggaattctgccttcgtaattttagaatctttttcttaaagtgacccagcccccaatccgtcctccccacaaaggcttaactttaggcctcaacgaccctagacccacgccggacaatccctctaatccctctctccc

SEQ ID NO: 295 - DNA, 5981 bp, Homo sapiens
ctctagactgggcaacaaagcaagactccatctcaaaaaataaaataaaataaataaataaattttatactttaagtatgtgcagcttaatttaccttattgaggtaaatgaagctactgaataatacctcaataatgccattttatgaaaatatgttttaaaaacataggatccactttcaacaagggcagcatgtcacacaaatacactctgttaaaattacaattttctattatttaccattgaataaaattaatgtcaagaaaaaataaaagagagtatcttaacggtataaagtattcaggataggctatgtgaataaggtcacatttacatggatttttaaggacagaaaaatattttgatgtgtgatacagaaagattaatctattaacatttttatttatccaactagcacttattagcacctgtgtactcaagcagcatgctcagcacagtgaagaccttttcaactgctgttagtaaatttccagactagacttaataaatttggtcatggccaaggaaattatactcaaaatttagctgccgttcacccagtcttcctacttaccagcttatttgcatacttattttcccattgtaggaataaggcattacatttaaaagcagcaaattatgcaatatatttaaatgtaaatcaacatgcagtttcatatatgtgatcagtatgcatttgttaagcatattatccattttgcaactgctatcttgagtacaaagtaaaactatgaaactttgattactctgagcaaataaacctcttaactacctcgggatcctattttctcttttgaacaattaaaagtagagtaaccatgtgatttactgtctaacttctgaaagtgatgggtgctattaattttttttttttttgagatggagtctcgctctatcaccaggctagagtgcagtggcacgatctcagctcactgcaacctccgcctccacctccccggttcaagcgattctcctgccttttttcaggtagctgggactacaggcgcacaccaccacgcccagctaatttttgtattttgtatttttagtagagacggggtttcaccatgttcgccaggatggtctcgatctcttgacctcgtgatccacccacctcggcctcccaaagtgctaggattccaggtgtgagccaccgcacccggcctgggtactattactattatgatgggtcaacagtagtaaacgagatcagtcccaggaaaactgggatgtatagtcatcccaggtacagggaggtttgttttgttgtaaagttacaagtataggtttctgaatgccactcagaactactgaatcagaatctctactgtgggatttgggaagccttatactgtaaagtgatatcattaaaggctcttccaattctaagttatacatttaatatggtaattttgaatatagactggatattgaatgatagggaattattattaatctttttttttcttttttgagacaaactctcactctgtcgcccaggctggagtacagtggcgcaatcttggctcactgcaaccccgacctcccagatgcaagcaattctcctgcctaaggtttcctgagtatctgagattacaggcatgtgccaccatgcctggataatttttgtatttttagtagagacaggatttctccatgttggccaggctggtctcaaactcctaacctcaggtgatccacctacctcagcctcccaaagtgctgggtttacaagcacgagccaccgtgcctggccagtattattaatcttatatgtaataatgatgtgattacataggagaatgttcttatttttaggaaacagacacagctgcatttaggagtgatgtgtcatgatatccgaatcctttcaactgatacagggaacacacacatacatacaatcaaagctgataatgggtatatacatgtccactatactattctttcaattttatgtatgcttgaaatttatcataataaaatattgagaagaagactgttagggaaaaacatttgtatgtataggtgagaacacattattgtcacaaatataacttaaaagaactatgaccaaaaaggtgtcaattcaagtaattactaaaaaagaatcaagcctgtaatttctcttcttggaattatttattttattttatttttttttttttttttgagacagagtcttgttctgtcgcccaggctggagtgcaatggtgcgatctcggctcactgcaacctctgcctccctggttcaaaagattctcctgcctcagcctccagctggaattacaggcacccgccaccatgcctggataattttttttttgtatttttagcagagacagggttttgccatgctggccaggctggtctcaaactcctgacctcaggtggtccgtctgcctcggcttcccaaagtgctgggattacaggcgtgagccagcgcgccagccggaattattttttaaagaataaaatttcaaagatattcactgcagaattgcttaaaatagtgttatttctgcaatactctgaatgtataacaataatggcatgaattatggtgcacgggtacattcaacgagggattattacacagccactaaaataattattattaggaatatattttaagactgggcaatgtggttcacacctgtaataccagtgctttggaaggttgaggtgggaggattgcaagaccagtctgggcaacatggtgagacccctgtctctacaaaaaaaatattttaaattagtcaggaatggtggcatgtacctgaagtcctagccactgaggaggctgagatgggaaggtcacttaaaccaaggagttcgaggctgcagtaagctatgatggtgccactgcactccagcctgggtgacagagcaagatcttgtctctaaatataaacaaccaaatattgacctatgctgctacatagatgcaaaaataatccaaatctatatgcttaactacataaccatttgtggagtcacgtggacagatctggaagtttacgtggaaaatgctacctatttgaaaagcagtttttcccctttatttcatttttttctttattttgaattctgccaatgattttgtgtaatagtatttttttaatggtatgggaagaaatcttttatcatgtgataccacataacagctgcctaaccacacaatgtagatatgaataaagatggctcagaaataagagtgtactagtattagtgactcaactagttaccattatgacaaatggaataaagttttgactgatttacaggagttttaaaatgcattttatattgagtagttatttcatgttttcttaaaacaattattgtactgaactaaaaataaactaggtagtttgttcacctaaccaatctacattcaaagacatgcttacaaattttccacttagttcatttttctgttctcagcattactacaaatgcctcattccgtcatcttgttgaattctttagcatcttctgtatcatttccaggggcatctctgggaagtagtgatgcctatcttccctcagaagcacactgataaccccaatatacccacaattcacacttattcccttctctgaggtgtgctgctttttggcacatcagaaaaaacacactactaggatttgaaaaactaagttctgggcctggttaggtcataaactacagaaaccttaggtcatatattctccccaggcgtttctccactacaaaaaaaaaattcattattcccttggtcttttgtagtcctttactatttcacttatcttcatgataacccttaaatttaagtaaggtagcattatgctcattttatagaagaaattcaatctcaaagaggacatagtctcccaaagatcccacaagtagtaatatattaggcagagctaaactcacacactcttactcaagatcctagtactggtacatgccgtgctaataagtttgctaaaatggataaagcagcaatttctcaggtcccttccaatgatcctgttctctgcttctacttgctattttttctctcttctctcaactagcattaacatccaaaactatatataatcaccaaatttcatttaccatggttttttaattattctttaaatttttctagttccatgttaaatccagagaaatgttactttttcgaaagtttctactactgcctctctctctgaaggccatgggacttaactatttgtcaaagcagaaattcccaacatttcgtaaacaccactaattactttttataactgtaaagacaattattccatacttaaaaccaattcaaaataaaataaatcctcaatacttcttattccctggggtagtaattttaattagattttattgattctttattttctcctatgtgcctttatttgggaaatactgttagtctaccttactatcgagtctctttccctagcaagaaaatgtcagtcttaagagtcaggaaagcttttactttcactatcacatatgaagaatgaactaaacacctaaattggataggaaaacttaaatgagggattcaggacacttcccaaggggtcatatgaccaatttaaaagttggtatgatgtgtctaaaataacaaattaactcttttacttataataaaggtacagatgtgctgattagtcatgctaacatgtacatatgaaatatgcctaaaccaaattaaaagaaaacaaaatacagtctatggcaatcttgaaaattcagggagctcaataaatattaagaggatgctctcacaatgagagcattaaacacttggtaattaacataatttaatatgcaaaaataagaaaatatacaggatgagggatgaggagtacacataggaaatttttgtgattttcttcattttgattgtattgctttcttgtcttcaggagggaagattttgacttcaaaagtaacaaaatatttaagaagggaattcacatctttctgttctaaatgatattcttgcgctattttctcagcagttcatgtttctggataaagtttatgattattgaaaagtgtcaatgcttctacagtggaaattttgcctttgggaatgctcttaatatttatcatatcaaagtgatggcctttcggcaatctgaatttctttggctcctgacgtgtttcagcagctttcagctgcacggaagacacaggatctttggaatcaacacacacatattttagaaatgacagcagcttgtcatctttacgagcaatctctcccttaatttctggatagagactaatctgctctggcaggaggctgctggtagaggggtgcctgggagcgagagagggcttcatgttgcggatttccctttccgctcggttctcttgaaattcctgatcccgcgagtcaccgcagcccccatctccttacaacatgatgccctcaggttcacagtaatgtattttttaaaaaccagtcgttgttaccttaatttggtcccaagggctgtaaaggtcagtttacaactcgttgaacaactgagtaagatttaaggcaactcaactgatagctgcatacctaatttaggatatccatagaattgttttgtcaactacaaatataacaagcattaagtgtaaactgtgttgctgaaaagtactccaagtatcttaggaacacccaccgcaatgtgtgggctaaatgcacacgtacaatgatagcagaaataatacctgtcatataggacgggcatgtcagccttttctccgcgaaaggcttctggtcctaagctgtcccttactttcaccggaatgagatgcgtccagagtcccaagcaagggaggagactgctcctttacccaggaggctggaaactgctcgatgcgagcgcagtttccgacgcccttcggctgagacctgcagcaccggacgatgtcccagttgccagctttagttgctaa

SEQ ID NO: 296 - DNA, 5982 bp, Homo sapiens
ctctagactgggcaacaaagcaagactccatctcaaaaaataaaataaaataaataaataaattttatactttaagtatgtgcagcttaatttaccttattgaggtaaatgaagctactgaataatacctcaataatgccattttatgaaaatatgttttaaaaacataggatccactttcaacaagggcagcatgtcacacaaatacactctgttaaaattacaattttctattatttaccattgaataaaattaatgtcaagaaaaaataaaagagagtatcttaacggtataaagtattcaggataggctatgtgaataaggtcacatttacatggatttttaaggacagaaaaatattttgatgtgtgatacagaaagattaatctattaacatttttatttatccaactagcacttattagcacctgtgtactcaagcagcatgctcagcacagtgaagaccttttcaactgctgttagtaaatttccagactagacttaataaatttggtcatggccaaggaaattatactcaaaatttagctgccgttcacccagtcttcctacttaccagcttatttgcatacttattttcccattgtaggaataaggcattacatttaaaagcagcaaattatgcaatatatttaaatgtaaatcaacatgcagtttcatatatgtgatcagtatgcatttgttaagcatattatccattttgcaactgctatcttgagtacaaagtaaaactatgaaactttgattactctgagcaaataaacctcttaactacctcgggatcctattttctcttttgaacaattaaaagtagagtaaccatgtgatttactgtctaacttctgaaagtgatgggtgctattaattttttttttttttgagatggagtctcgctctatcaccaggctagagtgcagtggcacgatctcagctcactgcaacctccgcctccacctccccggttcaagcgattctcctgcctcagcatcaggtagctgggactacaggcgcacaccaccacgcccagctaatttttgtattttgtatttttagtagagacggggtttcaccatgttcgccaggatggtctcgatctcttgacctcgtgatccacccacctcggcctcccaaagtgctaggattccaggtgtgagccaccgcacccggcctgggtactattactattatgatgggtcaacagtagtaaacgagatcagtcccaggaaaactgggatgtatagtcatcccaggtacagggaggtttgttttgttgtaaagttacaagtataggtttctgaatgccactcagaactactgaatcagaatctctactgtgggatttgggaagccttatactgtaaagtgatatcattaaaggctcttccaattctaagttatacatttaatatggtaattttgaatatagactggatattgaatgatagggaattattattaatctttttttttcttttttgagacaaactctcactctgtcgcccaggctggagtacagtggcgcaatcttggctcactgcaaccccgacctcccagatgcaagcaattctcctgcctaaggtttcctgagtatctgagattacaggcatgtgccaccatgcctggataatttttgtatttttagtagagacaggatttctccatgttggccaggctggtctcaaactcctaacctcaggtgatccacctacctcagcctcccaaagtgctgggtttacaagcacgagccaccgtgcctggccagtattattaatcttatatgtaataatgatgtgattacataggagaatgttcttatttttaggaaacagacacagctgcatttaggagtgatgtgtcatgatatccgaatcctttcaactgatacagggaacacacacatacatacaatcaaagctgataatgggtatatacatgtccactatactattctttcaattttatgtatgcttgaaatttatcataataaaatattgagaagaagactgttagggaaaaacatttgtatgtataggtgagaacacattattgtcacaaatataacttaaaagaactatgaccaaaaaggtgtcaattcaagtaattactaaaaaagaatcaagcctgtaatttctcttcttggaattatttattttattttatttttttttttttttttgagacagagtcttgttctgtcgcccaggctggagtgcaatggtgcgatctcggctcactgcaacctctgcctccctggttcaaaagattctcctgcctcagcctccagctggaattacaggcacccgccaccatgcctggataattttttttttgtatttttagcagagacagggttttgccatgctggccaggctggtctcaaactcctgacctcaggtggtccgtctgcctcggcttcccaaagtgctgggattacaggcgtgagccagcgcgccagccggaattattttttaaagaataaaatttcaaagatattcactgcagaattgcttaaaatagtgttatttctgcaatactctgaatgtataacaataatggcatgaattatggtgcacgggtacattcaacgagggattattacacagccactaaaataattattattaggaatatattttaagactgggcaatgtggttcacacctgtaataccagtgctttggaaggttgaggtgggaggattgcaagaccagtctgggcaacatggtgagacccctgtctctacaaaaaaaatattttaaattagtcaggaatggtggcatgtacctgaagtcctagccactgaggaggctgagatgggaaggtcacttaaaccaaggagttcgaggctgcagtaagctatgatggtgccactgcactccagcctgggtgacagagcaagatcttgtctctaaatataaacaaccaaatattgacctatgctgctacatagatgcaaaaataatccaaatctatatgcttaactacataaccatttgtggagtcacgtggacagatctggaagtttacgtggaaaatgctacctatttgaaaagcagtttttcccctttatttcatttttttctttattttgaattctgccaatgattttgtgtaatagtatttttttaatggtatgggaagaaatcttttatcatgtgataccacataacagctgcctaaccacacaatgtagatatgaataaagatggctcagaaataagagtgtactagtattagtgactcaactagttaccattatgacaaatggaataaagttttgactgatttacaggagttttaaaatgcattttatattgagtagttatttcatgttttcttaaaacaattattgtactgaactaaaaataaactaggtagtttgttcacctaaccaatctacattcaaagacatgcttacaaattttccacttagttcatttttctgttctcagcattactacaaatgcctcattccgtcatcttgttgaattctttagcatcttctgtatcatttccaggggcatctctgggaagtagtgatgcctatcttccctcagaagcacactgataaccccaatatacccacaattcacacttattcccttctctgaggtgtgctgctttttggcacatcagaaaaaacacactactaggatttgaaaaactaagttctgggcctggttaggtcataaactacagaaaccttaggtcatatattctccccaggcgtttctccactacaaaaaaaaaattcattattcccttggtcttttgtagtcctttactatttcacttatcttcatgataacccttaaatttaagtaaggtagcattatgctcattttatagaagaaattcaatctcaaagaggacatagtctcccaaagatcccacaagtagtaatatattaggcagagctaaactcacacactcttactcaagatcctagtactggtacatgccgtgctaataagtttgctaaaatggataaagcagcaatttctcaggtcccttccaatgatcctgttctctgcttctacttgctattttttctctcttctctcaactagcattaacatccaaaactatatataatcaccaaatttcatttaccatggttttttaattattctttaaatttttctagttccatgttaaatccagagaaatgttactttttcgaaagtttctactactgcctctctctctgaaggccatgggacttaactatttgtcaaagcagaaattcccaacatttcgtaaacaccactaattactttttataactgtaaagacaattattccatacttaaaaccaattcaaaataaaataaatcctcaatacttcttattccctggggtagtaattttaattagattttattgattctttattttctcctatgtgcctttatttgggaaatactgttagtctaccttactatcgagtctctttccctagcaagaaaatgtcagtcttaagagtcaggaaagcttttactttcactatcacatatgaagaatgaactaaacacctaaattggataggaaaacttaaatgagggattcaggacacttcccaaggggtcatatgaccaatttaaaagttggtatgatgtgtctaaaataacaaattaactcttttacttataataaaggtacagatgtgctgattagtcatgctaacatgtacatatgaaatatgcctaaaccaaattaaaagaaaacaaaatacagtctatggcaatcttgaaaattcagggagctcaataaatattaagaggatgctctcacaatgagagcattaaacacttggtaattaacataatttaatatgcaaaaataagaaaatatacaggatgagggatgaggagtacacataggaaatttttgtgattttcttcattttgattgtattgctttcttgtcttcaggagggaagattttgacttcaaaagtaacaaaatatttaagaagggaattcacatctttctgttctaaatgatattcttgcgctattttctcagcagttcatgtttctggataaagtttatgattattgaaaagtgtcaatgcttctacagtggaaattttgcctttgggaatgctcttaatatttatcatatcaaagtgatggcctttcggcaatctgaatttctttggctcctgacgtgtttcagcagctttcagctgcacggaagacacaggatctttggaatcaacacacacatattttagaaatgacagcagcttgtcatctttacgagcaatctctcccttaatttctggatagagactaatctgctctggcaggaggctgctggtagaggggtgcctgggagcgagagagggcttcatgttgcggatttccctttccgctcggttctcttgaaattcctgatcccgcgagtcaccgcagcccccatctccttacaacatgatgccctcaggttcacagtaatgtattttttaaaaaccagtcgttgttaccttaatttggtcccaagggctgtaaaggtcagtttacaactcgttgaacaactgagtaagatttaaggcaactcaactgatagctgcatacctaatttaggatatccatagaattgttttgtcaactacaaatataacaagcattaagtgtaaactgtgttgctgaaaagtactccaagtatcttaggaacacccaccgcaatgtgtgggctaaatgcacacgtacaatgatagcagaaataatacctgtcatataggacgggcatgtcagccttttctccgcgaaaggcttctggtcctaagctgtcccttactttcaccggaatgagatgcgtccagagtcccaagcaagggaggagactgctcctttacccaggaggctggaaactgctcgatgcgagcgcagtttccgacgcccttcggctgagacctgcagcaccggacgatgtcccagttgccagctttagttgctaa

SEQ ID NO: 297 - DNA, 808 bp, Homo sapiens
attaggcagagctaaactcacacactgtcactcaatttcctaatattggtacatgccatgctaataagtgtgctaaaatggatgaagcggcaatttctcaggtcccttccaatgatcctgtcctctgcttctacttgatattttttctctctttcaactagcattaacatccgaaactgtatatcatcaccacatttcatttaccatggttttttaatttaattattctttaaatttttctatttccatgttaaatccagagaaattgttactttttggaaagtttctactgctgcctgcctctgaaggccacgggacttacctgtttgtttgtcaaagcagaaatgcccaacattttgtaaacactaatttttttataactgtaaagatgattattccatacttaaaaccaattcaaaataaaataaatcctcaatacttcttattccctggggtagtaattttaattagattctattgattcattattttctcctgtgtgcctttatttgggaaatactgttagtttaccttgctatcgagtctctttccctaacaagaaaatgtcagccttacgagtcaggaaagcttttactttcactatcacatatgaagaatgaactaaacacctaacttggaaagtaaaacttaaatgagggattcaggacatttcccaaggggtcatctgaccaatttaagagttggtatgatgtgcctaaaatagcaaattaactcttctacttataataaaggtgcagatgtactgattagacatgctgacatgtacatataaaatatgcctaaacca

SEQ ID NO: 298 - DNA, 192 bp, Homo sapiens
aaaaaatgagctgggtgtggtggcgggcgcctgtagtcccagctactcgggaggctgagacaggagaatggcgtgaacccagaaggcggagcttgcagtgagctgagatcacgccactgcactccagcctgggtgacagagtgagactccgtctcaaaaaaaaaaaaaaaaaaaaaaaaaagactatgctct

SEQ ID NO: 299 - DNA, 691 bp, Homo sapiens
gcttaattaaaaaaaataaaaataggccaggcacggtggctcatgcctttaatcccagcactttgggaggccacggtgggtggatcacctgaggtgaggagtttgagaccagcctggccaacatggtgaaaccctgactctactaaaaatacaaaaaattagctgggcatggtggtgggaacctgtaatcccagctacttgggaggctgaggcaggagaatcacttgaacctgggaggcagaggttgcagtgatccgaggtcacgccattgcacccagcctaggcaacaagagcgaaactccgtctcaaaataaataaataaataaaaagtttgtgctgttaatttaatggggttgggagagtgaacaagttgttttcatcaaacaattctagagttttggagtggggtgcttaggaacgtcatgttttctgacattgtgacttactcctgttgagctgctcttcccgaagcactgaggcaggagtgctctccacccaacaaactgacctcccagttaacattccttagcaatgcgagtcaaagaagtgcttttaagtgtctctgatttttaacacatcactctgcaggtcagtgtctatctggaaatttctacgtgagaggtgatggaaccagagtttacttcttcacacaaggtatgaaacacccatctttttacactaaaagtcccca

SEQ ID NO: 300 - DNA, 16225 bp, Homo sapiens
gaagctgagtctgatagaacttagcccgtgaccttaatgggtactcggcagatgcagctgcctggctgattagagaacaggacaggcatggaccctgctttcggagcagtgctgtggaatagaactttgtgcagtgacggaaatgttctgcatcttcactctcccttatgatggtcagtagccacgtgtgaaatgtatctaatgggactgagaaactaaatttttaatttaagtagccacaggtagctagtgattaccatagcaaatgctgcagttccccaggtttttagtcttgattatacctcccagaagtcgtctgctccaaaggtcaacagttcagcaggaagcagagcccatgcctttgagaggctggaggtattgcatactcccaaaaatcccaggggctcactcataatgagcccaacagtgcagaagagttctgggctgttgtttctaaaatgcaagcatacagccttcctcctctcccattttcatttagacctgtactaacagaattctggcattacaaattgttttgtattttgatgtcttcagaataaatatataatgtgcttcataattgaaagcaattttgatggttttaaaatcaacattttttgtgttgctaccttgtgctgagacttgtgctagatagtgaggataccaagaaaaataagcacagggattttgtgttgttcatctttatctcctcagcatctaagataatacccaatgcatagtgggctctcagtagtgtttggtgaactaataagcgaaagatataatcgccactgtcaaagcactcactcactatgtggtgggggccaacagacaggtacagatgtgttcctggtgtggagaaagtgccagggtggctcagcgaagaaaaaagaattcttgtggtgctatcaagcaaggcttcatttgagggaaaagtaggatttctgtaggtggaaaaagagaagacattgatttgaaactccctggttgttttataaacttcatattagctatgtccacagagcctccaaaaggatataattcaaaagggattttaaccaaaatgaaatatgttgtgactaatagatacagtttatttgaatgaatgatagtttttcccatttgatattttaactgtgctacacaagaatgagagtagacatagctcgatttgtagtctcattgttctgtcttttctgcccatttcagtgacccaggactctttgtttattgctgtgatttttcttccacagctatagaactggtccaggtgagtacaatgggaaattacctattggtaatttccactgattaaagggaaaaggttctcctaaaaatcaaggtctctggctgtgttcttatacagtctgtgttcttacggtctaaaagtaaaagatttactgataacgagcataccttgttttattgcagttcactttatcacactgtatagatgtcgtatctgttcatatattgaaagtttgtggcaaccctgcatcaagcaagcctaccggtgccatttctccaccaccatatgctcacttagtatctatgtgtcatgctttggtgattctcagaatatttcagacttttttactgttatgtatgttatagtgtgtgatgttactgttgtacttggtttggggttccacaaatcacatctgtgtaagacggtcaacttaataaatgcatgcgttgtgactgctccaccaacctgccattccatttctctccctctcctcaggtctccttgttctctaagacacaatattgcaattaggccacttcatactctacagtgtcctctgtgtgttcaagtgaaaggaagagtttcaccacgttgcccaggctggtctcgaatgatagcttacacttgtgttgtaattattaaatttaatacacaattgcataaactaatgaaatacgattgcatgctggtgcggtgactcatgcctgtaatcccagcactttgggaggccggggtgggcagatcacgaggtcaggagttcaagaccagcctgaccaagtgaaaccctgtctctactaaaaatacaaaaaaattagccgggctaaaaatacaaaaaatggcgcatacctgtaatttcagctactcaggaggctgaggcaggagaatcacttgaactcaggaggtggaggttgcagtgagctgagatcgcgccactgcactccagctagacaacagagtgagactccatctcaaaaaaataaaaatacattattggtcggccacaatggcttaatgcctgtcatcccaacactttgggaggctgaggcagacagatcacttgagatcaggagttcaagactggcctaggcaacatggtgaaaccccatctctactaaagaaaaatacaagaaattatccaggcatggtggtgggcacctgtagtcccagctactcaaaaggctgaagcaggagaatcgcttgaactggggaggcaaaggttgcagtcagccaagattgtgccactgcactccagtctgggcgacagtgagactccatctcaaaaaaaagagagagaaagaaaaaaaaatagtttattgctaaaacatgttaataatcatctaaaccttcagcaagttgtaatctttgctagtggacggtcttgccttgatattgatggctgctgactgatcagggtggtgattgccaagggttggggtggtcgttgctaagggctggggtgactggcaatttcttaaaataaggtaacagtgaagtttaccgtatcatttggctcttcctttcatgaaagatttctccgtagcatgcgatgctgataggattttgcccacagtagagcttctttcaaattgaagtccattctctcaaaccctgctgctgctttatcaactaagtttgatgccatttcaaaacaaaaaacctttcttgccatttctaaacaatgttcatagcatctttactggagtagatttgatctcaataaaccactttctttgcccaaccgtaagaagcaactccttatagataaggatgctggtttaaaaagaaagaaagaaagaaagaataagactaaaaaacaagcagcaacaagattgcagcaattcagtcacatcttcaggcttcactttttttttttttttttttttgagacagggtctcactgtgttgcccaggctgaagtagagtgacacaatcatagcccactgtagccttgaattttgggctcaggcgaacctgatgagatgattccattggggttctttgagttacaagtaacagaaacgtctagacaaactcaaagcaataaagtagaatgtcatagaacctaagggcacaaaatacagccccaagttcctggtatcttacctgtcattgtccagggcccatttgttttttccctctttgcataccagttttctctagtcagtatttcctaattttgcacgcggccccaacgtgcttgctcctcccagtcccttacaagctcaccctgttcaggggttcatggtgcctcactaaaatgattgtgtcccagttctgaagtccctggaaagtctagttaacacaacctagctgataaatacagcagccctgtttgaatcagctttggccaatgagaaacaaactcacatatttgcagaagacggacattgagggtagatgccttaaaatgtatctgttatggctggggtcagtggctcacacctgtcatcccagcactttgggaggccaaggccagcggatcacgaggtcaggagttcgataccatcctgaccaatatggtgaaaccccgtctctactaaaaatgtgaaatttagctgggtttggtggcacgcacctgttgtcccagctacttgggaggctgaagcagaagaatcgcttgaacccaggaggcggaggttgcagtgagccgagatcgcaccactgcactccagcctgggtgacagagcaagactccatctcaaaaaaaaaaaaatgtgtctgttacaattggccgggcatggtggccagcactttgggaggctgaggtgggcagatcacttgaggtcaggagttcaagaccagcctggccaacatggtgaaaccctgtctctactttaaaaaacacaaaaactaggccgggtgcagtggttcatgcctgtaatcccagcactttgggaggctaagacgggcagatcatctgaggtcaagagttccagatcagcctggccaatatggtgaaactccatctctactaaaaatacaaaaattagccaggtatggtggtaggtgcctgtagtcccagctactcgggaggctgaggcaggagaatcgcttgaatctgggaggcagaggttgtagtgagccaagatcacgccattgcactccagcctgggctacaagagtgaaactccatctcaaaaaaaaaaaaaaaaatacaaaaactggcaggacgtggtggcatgcacctgtaatcccagctactggggaggctgaggcaggagaattgcttgaacctgggaagcagaggttgcagtgagccgagatcgcaccactccagcctgggcaacagaacaagactctgtttcaaaaaaaaaaaaaaaaaagagtctgtcacaattatgtacaatgctgttagggcagattaggaattggtagtgccatgcttttagaattattattcagttaaagaccaaatgaatattgaagcctacctttacttcagtttttgataacaaagtaaattttctacatctacagaaatagattttcctgaagaattctatggtttgtgtaatattttctagttgggagttgttttaaatcgtgtgctttgttgtttgttttgagacagggtctcagtcactcaggctggagtgcggtggtacaatcaaactcactgtggccttgatctcctgggctcaagtgattctcccacctcctgtgtaactgggactatgggcacatgccaccacacttggctaatttttttttttttttttttttttgcgacggagtctagctctgtcgcccaggctggagtgcagtggcgtgatcttggctcactgcaacctccgcctcccaggttcaagcgattctcctgcctcagcctccagagtagctgggattacaggcgggtgccactgcacccagctaatttttttgtatttttagtagagacggggtttcactgtgttggccaggctggttttgaactcctgacctcaggtaatcctcccacctcgacctcccaaagtgctaggattacaggcatgcacccggcatttttttattttttgtagagatgaagtctcactatgttgcctagctggtctcaaactcctgggctcaagtgatcctcctgcctcagcctcccagggtgctgggattctaggcgtgagccaccgtgcctagcagatcgtgcttttggtttgtttgtttgtttgtttttgtttttgtttttgagacggagtctccctctgtcgcccaggctggagtgcagtggtgccatctcagcttactgaaagctccgcctcccgggttcacgccattctcctgcctcagcctcccgagtagctgggactacaggcacctgccaccacgcccggctaattttttgtatttttagtggagacggggtttcaccatgttagccaggatggtctccatctcctgacctcatgatccgcctgcctcggcctcccaaagtgctgggattacaggcgtgaaccaccgcgtgcttatttaaagtatgtgctgtctctctccttacgaatgtttttttttccctgttggtcactcattttcatgatcgttttccaattcttagatctgacttcatgcatgagaagtacagaaagtacacaagaataaagaataaaagtaggggagtcaggaatgttctattttaaaagcaactattagattcctcactgtctcccttcaattattcctgatctttactctttgagtcctccctgaaataacatgctattagattgatgcaaaagtaattgtcgtttttgccgttactttttttttttttttcttttttttagatggagtttcactcttgttgcccaggctggagtgcaatggtgcaatctcggctcactgcaacctctgcctcctgggttcaagcgattctcctgcctcagcctcccgagtagctgggattataggcatgtgccaccacacccagctaattttgtatttttagtagagatggggtttctccatgttggtcaggctggcctcgaactcctgatcttaggtgatcctcccgccttggcctcccaaagtgctgggattacaggcatgagtctccacatccttgccattactttcaatagcaaaaaccgcaattactttttcaccaatctatataatgattagaaatatatcccctactctggagggtgaggcaagtgatcctatcgcgtgaacccaagagtttgaggccagcctgggcaacatggggagattttgcctcaagaaaaaaaagaaaaaagaaatatatccctctttgtgaagtagcaacagttacatttaaaatttaaaacaagataatcttttctttaggctatgttaatattttctaacttacctgtgtcttccatctgtctgcagacaaattcagaatatgatccttctcggtgttttgcctttgttcacgacctgtgtgatgaagagaagagttacccagtgcccaagggcagtcttgatattatcattctcatatttgttctttcagcaattgttccagacaagtaagtttgggtcccttggctggtagtgtcacaaaaaggaagctttggtgagggacctttttttttaaaataggttcttgctctgtcagcccaggctggagtgcagtggcacgatcatggctcactgcagccttaacctcttgggcttaaatgatcctccctcctcagcttcccaagtaggtgggaccacaggcacgtgccaccagtcctggccaatttttgtgtttttagcagagatggggttttgccatgttgcccagactggtcttgaattcctgggctcaagcgatcctcccaccttggcctcccaaagtgctgggattataggtgtgagccaccatgcccagcctggcgagggaccttgatattagagttgggctcaaagtaaaaagagttttgtttatgttctgatagacacaaagaagccacaccatttgtagtgatgtgagcatctcagccattttcctaaatttgtcttgatgtccaacttctgttctggcctcgaaacttctgcagtagttggttcttcatttccttgttgtggctcaacattgggaaagaatgggaaatcagtctctaatgagtatgtggggaaattcctattgatagtctcatcacatgccgttttagaactgtgaactgtgggtgtcacagctcttaggtaatgtctcattattggatttttattttattttattttatttttttgagatggagtcttgccctgtcgcctgggctggaatgcaatggcgtgatctaggctcattgcaacctccacctccccggttcacacaattctcctgcctcaacctcccgagtagctgggattacaggcacctgctaccatgcccagctaatttttgtatttttagtagatgcggggtttcaccatgttggccaggctggtcttaaactcctgaccttgtaatctgcttgcctcaaccttgcaaaatgctgggattacaggcatgagccactatgctggccttttttttttttttgaagacggagtcttgctctgttgccccggctggggtgcagtgatgagatcttggctcactgcaacctccacctcccgggttcaaccaattctcctgcctcagcctcccaagcagctgggattacaggtgtacgccaccatgcctggctaatttttgtattttttttttttagtagagatggtgtttcaccatgttggccaggctggtctcaaactcctgacctcatgacctcatgatccgcccgccacggcctcccaaagtgctggaattacaggcgtgagccaccacgcccagcctattggccttttaaatgctttaaataaaacaaccttattagcaacatgaaatttacattgaaccttaactaaggtgttctctgatgcttacagtgttttaggaaagtgtgatacagaattctataaaatcagattcagattaaaggaaagtcaaatgctatatcctaaaatacaccattaaaacttcatatgcataggtaaccagtggtcctgtgacactaccttctcttttttttttctgagatggagtctcactctgttgcccaggctggagtgcagtggtgagatttcagttcactgcaacctctgcctccaaggttaaagcgattctcctgcctcagcctcccgagcagctgggattacagacaagcaccaccacacctggctaatattttttgtatttttagtagagacggggtttcactatgttggccaggctggtcttgaactccttacctcaagttatccacccacctcggcatcccaaagtgctgggattacaggcatgagccactgcaacctgaccaaaactaccttctcaaggaagcagagtcagatggtggctcagagattcagataccattgactaattccatggaagcccttggcactgccagagtgcagtgagtctggacaggctgggggttggcacatgttagggtaaactatacccatgaaatcatgagattagagacttcaaacatctcctcattctgtgtcatcagagtcctgcaaaggatgattaagtaagttagtgttaaaggtcaaggtaagctggtgttaggaagccagattacatgactagagactgcagggaccagtgattgagatcctggtttatctcccagagtccaaggacccctcactggctgcacaggataggagctttgggtgattgaccttcctctagaaggccacacttcctctagaagggtactgaagtcatccaacctgagaggatgagtgtgaaataaaggcatatgcaggataacccaaaaggcctaccatggttttaaactttaataattgcagaggttgaccaggcacagtggctcacgcctataatcccaccactttgggaggctgaggtgggaggagtgcttgaagccaggagctcaagaccagcttgggcaacaaagcaggaccgttatctctactaaaaataaaaataaaaaaatttagccaggtgcatatctgtagtcccagctactcagaaggctgaggcaggagtatggcttaagcccaggagtttgaggctgcagtgaagtgagctacgatcacaccactgcactgcagcctgggtgacagagtgagaccctgtctcaaaaaaaacctatgaccttagaagtttcaatgctacaaactttttaaaaattgacatggactaaaacaaattattaaaatttaaaattcaagccagacacagtggcacacacttttagtcccagctacctagagactgaggcaggaggatcacttgagcccaagagtccagccgaggcaacatagcatagcaggaccccagctgttttttgtttgtttgtttgttttctgagatggagtttcactcttgttgcccaggctggagtgcagtgctatggtcttggctcactgcaatctccgcctcccaggttcaagcgattctcctgcctcagcctcccaagtagctaggattacaggtgcctgccaccatccctggctaatttttttgtatttttagtagagacagggtttcaccatgttggccaggctggtctcgaactcctgacctcaggtgatctgcctgccttggccgtttttttgttttttggttttttttaagagggaaacattcattatgcaaaatttaaatagactttgaaatttttttggtgaagtttgtagcatttagacttctgaagttatgaaagcttcaacctgcaccaagacttttgaagaacactgcatatggaaaacacagacctaagtgtaaaaccctctgtctgttatactcatttgcatactgattgtattgtaagttcttgaggacaagtcttcatttaacaaacagaaagatacagcccctacattgaaagagctcaggtctaatgatgcaggcagataagtcacctagcagaacccactggatgctcaggattcagctcagccacaggcgcacagggcaaagatggctatctaggacagtggggaagtgagccagatagagagcagagaacttttgtttgtttgtttgttttttggagacaaagtctcagttactctgcggcccaggccggagggcagtggtgcaatcttggctcactgcaacctccacctcccaggttccagaaattctcctgcctcagcctcctgagtgtctgggattacaggcacacgccaccacacctggctactttttgtatttttagtagagatggggtttaaccattttggccaggctggtctcaaactcctgacctcatgtgatccacctgcctcagcctcccaaagtgctggtattacaagcatgagccaccgcacccggccaggagcagggaactttcttacggcagaagcgggctgtcctcgggccccttcaggctgaaggcagtggatcgaggccacagctgtgagcaggcagctaatgtccttcagttctaactgaagcaagagtagaggagcttagatctcagacttggtgtgtcagttgaggaagtccactggctttttgggatatgctacagggaaagagaaccccgtctttaaggagacctgattgaccgtcattccctgctgctccacaggatgcagaaggctatcaacaggctgagcaggcttctgaaacctggcgggatgatgcttctgcgagattacggccgctatgacatggctcagcttcggtttaaaaaaggtattttgaaagtgctgaatcctaaccactagagatcatgtcctttgcagggacatggatgaagctggaaatcatcattctcagcaaactaacacaagaacagaaaaccaaacaccactttttctcactcataagtgggagttgaacaatgagaacacatggacacggggcggggggcatcacacactggggtctgtctgggggtgagggggctgggagagggatagcattagcagaaatacctaatgtagatgacgggttgatgggtgcagcaaacctccatggcacatgtatacatatgtaataaacctgcacgttctgcacatgtaccccagaacttaaagtataattaaaaaaaaaaaaaggtatttggccactataatcaaaaaatggtgctgccatcagaatagaaactctagaattagaactccttatataaagccatttaatatgtgacagagtagtatattttttaagaaaactgaagaggcttgtataatctagatattgaggtctttttaagcaagacagctacctttagaagagcttttattagaaagacatttgaaagacagccgggcgcagtggctcatgcctgtaattccaacactttgggaggccgaggtgggtggatcgcctgagttcaagagttcaagaccagcctgaccaacatggagaaaccctgtctctactaaaaatacaaattagctgggcatggtggcgcatgcctgtaatcccagctactcgggaggctgaggcaggagaatcgcttgaacccaggaggcagaggttgcagtgagccaagatcacaccattgcactccagcctgggcaacgagtgaaactgtctcaagaaaaaaaaaaaaagatatttgaaagacataaataattttaaatgtggcatgacaaaagatgccattaaaaatgtaaaaggcaaatgacggagtaagaaggaatattttcagtgcatataatagataaagacttaatatctttgctcttcaaggagctctcatgaaactgataaggaaaagatcagtgacccacccaaaaaacaggcgaggagtatttagtcagttcacagaagaacatatctaaatggccagtaaacaacacttcaaggaaataaaaataacgagttagtacttcctattgctggccaattcaaagaaagaggtgcattccttcattactggtagaaaaagaaattgttacagcctttttttttgagatggagttttgccgttattgcccaggctggagtgcaatggcgtgatctcggctcactgcaacctctgcctcctgggtccacccgccttggcctcccaaaatgctgggattacaggtgtgagccactgtgcccagtgttacagcctttttttttttgagacggagtctcgctctgtctcccaggctggagtgcaatggcacgatctcggctcactgcaacctctgtctcttgggttcaagcaattctcctgcctcagcctcccgaatagccgagactacaggcatgtgccaccacgcctggctaatttttttgtatttttagtagagacagggtttcaccatgttggtcaggctggtctcgaactcctgaccttaggtgatccacccacctcagcctcccaaagtcctgggattacaggtgtgagccactgcgctcggcttacagcctttttttaagcacccaattattgttcaatccagtcattttttttgaatatagtcaagaactagcacataatacatgcaggagcaaaactttgtaaacaaagtgaatgcctctggatagggagatgttgtgcttgtcacctgaggtggaccccgtaccactgaacttggagggatttctgttctgtattcagtgagaggagagcaatgtgcaagggagtattttaaactccatccccctataccagtatctgcagggaaataagtacacacttgtgtgatgatttgggcattcaggaaggtctagaagtatgtgccaggccggtaaactgaggtaaggtcagggaggttagcagcagaagggaaagcatgttcatgatcaaaacaatatctgagttgtatttatgattctgtagacatgtgaagagacatgcaaaggacagtcaccaccaaaatggtaatgattgtctcaagtttccttaaactcagctatattgcttaattaaaaaaaataaaaataggccaggcacggtggctcatgcctttaatcccagcactttgggaggccacggtgggtggatcacctgaggtgaggagtttgagaccagcctggccaacatggtgaaaccctgactctactaaaaatacaaaaaattagctgggcatggtggtgggaacctgtaatcccagctacttgggaggctgaggcaggagaatcacttgaacctgggaggcagaggttgcagtgatccgaggtcacgccattgcacccagcctaggcaacaagagcgaaactccgtctcaaaataaataaataaataaaaagtttgtgctgttaatttaatggggttgggagagtgaacaagttgttttcatcaaacaattctagagttttggagtggggtgcttaggaacgtcatgttttctgacattgtgacttactcctgttgagctgctcttcccgaagcactgaggcaggagtgctctccacccaacaaactgacctcccagttaacattccttagcaatgcgagtcaaagaagtgcttttaagtgtctctgatttttaacacatcactctgcaggtcagtgtctatctggaaatttctacgtgagaggtgatggaaccagagtttacttcttcacacaaggtatgaaacacccatctttttacactaaaagtccccagtaccagatgagatggtcttcaaggcacgttcagaaggaaaactatctggtccctcctgccttttaggcaggctgtttcctgcggttccctgctgctcacaccctcttccaccctgggctaggctacccatggcagccaggcactggggcccccaggcagccctggcttgtccatgccttcagtcctgctctgctctccctgtctgccactgtccaaaatgggaagcctgcccactctgcaaggctcatctccagtccagcctgtttcaccctctacacggggttgtgctttggtgtgcccgggtcagggtgaaccctgggttctaggggtgctgggaactgctctcctctgcaactggcctatccacaggcttcatccttcacctgggccttccaaattctccgttcctgggcccttttcagggtcaccttctttgagcctttggttaagatgatgaaaccactttcctaaaacaattgctttgacatacatagatatttttgcataaattttaaggtgttcatagagcctaaaggccaaatataaaccaaaggtttttaaaaaagaaaaaaccgcggcccatacgcagtggcttcccctacctaaacatgaacttactgttaccaagccaccactgcatttataaccaaatggccatgtaaaaaacatgacagcaacttcccagagccccttttaacaaggacttagtagataaaaatgccttttcttgaggggaaaaatgcataaacatcttttattttccacactagaggaactggacacgcttttcaccactgctggactggaaaaagttcagaacctggtggatcgccgactgcaggtgaaccgaggaaagcaactgacaatgtaccgggtttggattcagtgcaaatactgcaagccccttctgtccagcaccagctgagaggcacctgctgccaacacgatgcaagcccattgtgtttccgggcttttttaaaaaaaaaattgtagcactgggcgtggtgcatgcctgtaatcccagccactcaggaggctgaggcggggaggatccattgagcccagcagtccaacctgggcaaaatagtgagagaccctgtatctgaaagtaataataaaaataaaaaatataaatgaggtctcgttgatgttggacaattcaagaattcagacttgaaccttaaacctaggaaaagttactttgtatcaggattctaacaattatgcttcatatttgtgaagtcctttaaaacataattttctcaagttctttctttgagatctcaatctgtcttagcattttgtaactaataactgaaattttattcaaaggaattgtaaaccttaaaccaccaatttatttccatgtgaaaaagtgttacatatgacaagtgttttttgactgtaattgcgttaaatcttttgagaatgtaaatgccgggctaggcaattgcagttaatacatacagaggttagtgaagggcttattaagttgtaggggaagcaagctgggaagaatcagatcagatattttcctgacaaaaaaaaatgaccctacagagagcatcaaaatgtggtgttcttgttaagtaattgatcgtggtcttcgctttaatcttagttccgccaggcacggtggctcacacctgtaatcccagcactttgggaggccaaggcgggcggatcagctgaggtcaggagttggagaccagcgtggccaacatggtgaaaccccgtctctactaaagataaaaaaattagctgagtgtgttggtgggtgcctgtaatccagctacttgggagactgaggcaggagaattgcttgaacccaggaggcagaggttgcagtgagctgagattgtgccactgcactccagcctgggcaacaaagcaagactctgtctcaaaaaaataaaaataaaaaaaaaatcttagttccatggaattttaagcattgttccccctctaacctgtgtctaaagaattaaaagaatttggccgggtgcggcagctcatgcctgtaatcccaacactttgggaggctgaggcaggcggatcacgaggtcaggagatcgagaccatcctggccaacacggtgaaacctcgtctccactaaaaataccaaaaaaattagctgggcatggtggcacacacctgtagtcccctgtagtcccagctactcgggaggctgaggcaggagaatcgtttgaacctgggaggtggaggttgcagtgagccaagatcatgtcactgcattccagcctgggcaacagaggaagactccgtctcaaaaaaaaaaaagaaaagaattttcactttttgcaaaattatcttttttaatgcacccttaagtgtttgacacaaaaggaattgagggaacttcttaattttaaccacatcatcacttcacttctgaatgtgatcattatcagtgttagatgc

SEQ ID NO: 301 - DNA, 614 bp, Homo sapiens
gcttaattaaaaaaaataaaaataggccaggcacggtggctcatgcctttaatcccagcactttgggaggccacggtgggtggatcacctgaggtgaggagtttgagaccagcctggccaacatggtgaaaccctgactctactaaaaatacaaaaaattagctgggcatggtggtgggaacctgtaatcccagctacttgggaggctgaggcaggagaatcacttgaacctgggaggcagaggttgcagtgatccgaggtcacgccattgcacccagcctaggcaacaagagcgaaactccgtctcaaaataaataaataaataaaaagtttgtgctgttaatttaatggggttgggagagtgaacaagttgttttcatcaaacaattctagagttttggagtggggtgcttacgaacgtcatgttttctgacattgtgacttactcctgttgagctgctcttcccgaagcactgaggcaggagtgctctccacccaacaaactgaccttccaggtaacattccttatcaatgcgagtcaaaaaaatgcttttaaagggtctctgatgtttaacacataactctgcaagtcagtggtctatctggaaaattct

SEQ ID NO: 302 - DNA, 687 bp, Homo sapiens
tcagtggtgcaatgatagctcattatcacctcaaacttctggctcaagccatccctccgcctcagcctcctgagtagctaggactgcaggtgggcaccatcatgcctagctaattgttagatcctttttttttatgttctgcattttttcagttatttttacatatttctctcttgatccatgcagttataggatatatccttaattttagaaagtaaggacttttcgaccaggcgtggcggctcatgcctataatcccagcactttgggaggccgaggtgggcagatcacttgaggtcaggagttccagtccagcctggctaacatagtgaaaccccgtctccactaaaaaataaaaaatcagcccggcatggctgtgggcgcctgtaatcccagctactcaggaggctgaagtagaattgcttgaacctgggaggcagaggttgcagtgagccgagatggtgccattgcactccagcctgggtgacaagagcgaaactgcatctcagaaacaaagatgcctagctttcaccttgttgatgtttttctaaattttggaataataaatttatataggaatactgcaagaatagtccatttttttctgatgtcccaacatcaccaaatgtatccatcacaagtaggaatacatggaaacattaatgccagccactaaccattcatgtt

SEQ ID NO: 303 - DNA, 382 bp, Homo sapiens
cacaaggtcaggagatggagaccatcctggctaacacagtgaaaccccgtctccactcaaaatacaaaaaaaaattagccgggcatggtggcaggcacctgtagtcccagctacttgggaggctgaggcaggagaatggcgtgaacctgggaggcggagcttgcagtgagcggagattgcaccactacactccagcctgggtgacagagtgagactccgtctcaaaaaaaaaaaaattgccaagcatgctggcatgcacctgtagtctcagctactttggaggctgaggccagaggattggttggggctgcagtgagccatgatcacacacaccactgtactccaggtgacagagcaagaccctgtctcaaaaatcaatcaa

SEQ ID NO: 304 - DNA, 439 bp, Homo sapiens
  misc_feature (343): n equals a,t,g, or c
  misc_feature (357): n equals a,t,g, or c
cctcagcgacccgcagccctcagggagcccctcccgcctcagcgcccaggagctgcggtccggagccggccccgagctgggcccaggtcgcaggctcctcaggccaaaggggtccccaggacggttaatgccccaggcctggagtcctcccccgcccggggctcagcctctcacctgccgccgccgccgccgccgctccacgctcctcccgggaggggccccgacccgacccggctgcggaccgctccgctctccccctgggcaggcccggggcggagccggggcctctcctgagcgccgcaaccccccgcccgggcagccgccgccggcgccgggctccacnaaagggcgggcggnggaggggggggcaccgaagccgcagatccccgggctcgcgtacagagccaggcgccgaacgcgggcccgggccccggcggcc

SEQ ID NO: 305 - DNA, 6302 bp, Homo sapiens
agcaggtaggaaactatgtgaaagaatctcctgatgtcataatttccgggtgtcaccggaacatttgatcatcattcctttggcaattccagccttctgtggaaaggccagtagaaagcattgatttattcacctctacaggaatcagactcagcctcttttggtaagtctatttatccttgatcaaattagctaaatgttaatacctgcatagataggtagttatactaaaccacagagtttattatggtttcactaaatcatcattgagcgaaacacttttttcttgatattgagacagtctataaaagttatcatattcaaatttttaaaccttaatttagttttattattaacaccaataaacattcacttttaggcatagaatactgtactaggcataagaaatagttgcaccattttaaatttttcctaccctttgtgtactaatagttgaatacattgtatactaatagttgaatacattgtgtactaatagctgaaaacattgtgtactaatagctgaaaacattgtgtactaatagttgaaaacattgtgtactaatagttgaaaacattgtgtactaatagttgaatacattgtgtactaatagttgaaaacagtgtgtactaatagttgaaaacattgtgtactaatagttgaatacattgtgtactaatagttgaaaacattgtgtactaatagttgaatacattgtgtactaatagttgaatacatgcaagttatttcagggtagagctattaaatgtccactgtgtgacaagcactgttctaggtattaagtattcagggatgacaaagacagacttggaatgaggggggatattaaacatttacaaaaaatgagggtagtgtttctcaacagtgggcagttttgcctctctctcccaccaggggacatttgacaatgtctatagacattttgggctgtcacaattttgggagaggggtactctttgcatccagtgggtaaaggccttgaatgctgcgaaacatcctacagtgcacaggacagtatcctccctccccagctaagaactatctgatcccagctgtgaatagtgtcatggttgagaaaccctgaattagaaggataactgttacgaaggagaaataaaggttgctatgaaaacttagataatgggggttataaaagtaagttatagagtaagtaaaatgtaaattcagacttaatggattgcattggccatagcaagtgaagggtgggagcagggggtagggaagtgttccaaggtaggcagtaaggagttcatttatatgtgtttgtgtgtgtatttcataataaatttcatatctcaggtatacttgcagacatttatatatacttactaatgctcagtagtacctgctaaataataatagttaacatttactgagcacttactgtgtgttaggcactgcactttacgtgtattaccttacttaatcctcactattatcctagaagtagaaaatattatcaccaatgtacccttgagaaatatagataagtaccttgactgaagatcacatagttgggaagggccagagccagggactatactgtgactatagagaagcagtggggaaatgaataatcccctggaactgaaggattagctaaagatatcttggtgaatgtgaaactgtgctccaaaggaagagaagggcatagataggtagagaggtgcttgttgattgcaacaaccatttaaaggcatacagaattttgttttcacacggcagaaatggtcttcagttatgttaaccatagagtattttccttgcgttgcttggtggctattttgtattttttgcaagacttaaattgtacataagggatagttgtgaaatacagtattttaaacactatttttagctatttaaaaatagaataacattcagaatgtttctgtatgtctataacaaaatagtaatattaaaaattccaagggcaggcacgttgtgtgcacctgtagttccagttactcaggaggctgaggcaggaggatcacttaagcccagggtttcaaaattgtagtgcactatgattgcactggtgaataaccattgcactccagcctggccaacatagtgagactctgactctttaaaacattccatgcaagtctttgaagacaatctatctccacccccaatattttaattttctaatctaggttttcaatattttaactttccgatctaggttttcagtgaagtatgccttttcaatttggaacccagccaaggaggtttccagtggaaggaggagattcttcaattgagctggaacctgggctgagctccagtgctgcctgtaatgggaaggagatgtcaccaaccaggtaaagtcttctgtcctcacaagtgaggagatatgtattggctatcatcaatacaaccttcagctgatattcattattagcaagaaaaaactctcagcaattcaaaaacattgttgtttctaagttagcgtattaacagagcccagttttccttagtgtagagtctgtattttgtatttctgtaagtcttgatgatagagcaattcattctctgtctttctggtacatttttagctattaacaacaacaacaaaaacacaattacctttgcaccaacctaatagattgttttgttgatagcttcacgattagataacattcaattaaacaaacaaaacttcagtgctagtatgcacagggcactgtgctaggcataaggctaaaaatatgaaaaagacttagacctcagagttaatgtcactttggctttgattagtatcactttggctttgctgcgacctttggcagaaagagtgatatagaatctgaagattctgtgagacaaagtgtttttgcagaatgattagttccatttctctgatgtttaccatagcaaaaccttaaatactacattgttagattctcatggcttggaaattttgggaacacagatttaagtttaacaggtgtaggtatttaaaaatcggagttagtcaaggataaaatgggctgctttgggaagtagtgagctcccgatctttagaaatgctaaaggctgaatgactatttggtgggaatgttggaaaggaaattcatatattcgatgtatttttgaactaggtgtcatttaagggccatttcaaatctgagattctatcaacatttgaacagtatgtggaatactatgttcagttttgtattttaccacaaacattcttgttttgaaatcactcaactaaggtgatttagggtgcaaatgcacatgaattgccacggtattgtcacttatgtttgtaactatgcacttttgttttgccatttagcaatcattgcatacctttcaaaatcaacatccggaggattatctttgaatatatgaatttcctgtgattaaatatgtacgtcagaggccacaatttctttgttatatccatctaaaatgggtgcctcgtcagcatcaccatgttgtactcattgtatgacattcagagatttcaaagtgatttaaaacagttaaatatacaatcaaactttggtgctctgaaaaaaaatatttcctctttttagtatctaactacatgtcatctgcttttttattcaggcaactccggaggtgccctggaagtcattgcctgacaataactgatgttcccgtcactgtttatgcaacaacgagaaagccacctgcacaaagcagcaaggaaatgcatcctaaatagcaccattaagtcttttgtcaaggtctgactaggtcaagggtaatggaccagtatcatctggtgatctggtaaacaaataaaagtggtggcacctttagatgatgacaacagttgagctctttacttttagtaagaccgacagaaatgtagtcagtaaagcacatgtagtgataggctatcagttatgtctgatacataagacagaataatatttcacaattagaaagtaccttagagatcatcttgctcacagtagatcattaatatcaataattaaagatgaagcttaatccaccatggtcatcagtcaggtggggcttattctaaatgcttaatgtgtcttaagctcatttccttgttcatatttgggttgctacttggctaaatcctttcaccttagtaccctaagccagtttcctggcttgatactatttgataatgctctgctcaggaatgattatattgggtgagaaatggagccctggggttgtgtgttttggaacagtattcaagatcaaagaaagttcttagtccatggttaatctgcaaggcatttaagccacttccatagaggagcccagattgttggttaaatatattgataatgaagtcaaagctgtggttccaaccccgatttttccaagaaaaatgacgtctggttatcactttgtacacgaagtgctaaccaggtatcttgataaattgtttacagtaggtattgagaaacctcatgtggattttttaatttggttagatgtgggatcacttttgaggatgaggccagctctctatgttctctttttcttcttgcagtagtccccagaaactcagtctgctttccttttctctcgatggctgtcagcacccatctaatgaaattgtcttctccaaaagactgactttaggatcagatacaattttcaccagtgttttttgtctaccttgctgcttctgaaaatatacatataagccttttaaaatgaaaagtttattaacttataattaaatagacgtagatgcatatgtgttgcattaggtgaaaagaaaaactgccagggagttataagaggaaaaactctcagagctcacactgagctgggagaagtttgaatgccaaccagttaaagtggaaagatcttgaacatgtggggcattgagtagagactcagaaaggttgtactttcataagagatccaaactggagctagactaaaggctaatgtataccaattttaagaaagcttaaaaataagccttgagagactcaagatgatctctaagtaacctcattttatctgccaaataaaaatagaacattccttaaaggaagaaaacaaaatcgaggcaggaaattgcctgaggctggagaaaaaatgacaggaaggagaaaggagtgatgaaaaattcctcagagggctgggcttggtggctcatgcctgtaatcctggcactttgggaggccgaagtggatggattatctgaggtcaggcattcgaagccagcctggccaacatggtgaaaccccgactctactaaaaatacaaaaattagtcgggtatgatgggcaggtgcctgtaattccagctacttgggaggctgaggcaggaaaatagcttgaacccaggaggcagaggttgcagtgagctgagattgcatcactgtgctccagcctaggcaacagagtgagactttgtctcaaaaaaaaagaaaaacaaagaaaaattcctcagagctcatacaaggctgggtagaatatgtgtttcaacaatagtggatcttttaatatagtacatggatcattgagtagagtcttcagcaaaatattggcaaagtagggttagggttaggttagggagatgggaatagactgaagactactctggacttgccctaacagagtttaagagcaacatttgaaaggatcaaactgatttcaagtaacttgagtgcatccaaggggagaaaacccatcaaaataaaaataaaaactacaataaaatccagcaccaaaagtgtaacattcacaatgattagcatctaataaaaagttaccaggcatgaaaaaaaaaaggaaaaggcaatccacagtcaagagaatctttagtcaatggtaatagactgagaatgacagatgatggcattagtaaatgatatggtttggctctgcgtcccaacgcaaatctcatgttgaattgtaacccccagtgttgggggagggacctgataggaggtgactggattatggtgaacacctatatggatatgaatatggagtattctccatggatatggagaacaccccttggtgttctcataatagtgaatgagttctcatgagatctggttgtttaaaagcgtgtagcacttccttcttttccctctgtgtctcctgctccaccatggtaagatgtgcttgcttccctttgccttctgccattgtaagtttcctgaggcctcctagccatgcttcctgttaagcctgtggaactgcatcatttaaacctcctttcttcctaaattacacagtctcaggtagttctttatagcagtgtg

SEQ ID NO: 306 - DNA, 282 bp, Homo sapiens
ggccgggcgcggtggctcacgcctgtaatcccagcactttgggaggccgaggcgggcggatcacgaggtcaggagatcgagaccatcctggctaacacggtgaaaccccatctctactaaaaatagaaaaaattagccgggtgtggtggcgggtgcctgtagtcccagctacttgggaggctgaggcaggagagtggtgtgaacaggtgaggcagagcttgcagtgagccaagatagcaccactgcactccagcctgggtgacagagcgagactctgtctca

SEQ ID NO: 307 - DNA, 110 bp, Homo sapiens
agaaacatctcaaggcaatgatctaagcttctaccttaagaaaacagaaaaaaatgagcaaactaaatccaaaataagcagaaagaaagaagtaataaagagcagaaaca

SEQ ID NO: 308 - DNA, 537 bp, Homo sapiens
ctcttgatgcacgaataaatatctctacatctagcctttgttaaaaataaaaattaatattctacaaacacctacatatactagagaggggtgaaacactgcagctaattcctttataatactttcagatgattgcattaagcctttcatgttatgtggcattgttaatttttcctagatacccatccacttaagggccagagaaatccttattcatttaactctggtgggcatttatgtaacatacccaaataaaaacgttattaaacagccacaatcgcattcagtcaacttggcactgaatgtagcttctaaaatcagttctctaccctacgaatggaatgttctaccaagaaagagaagcatcaccatgtcatcttgtgttctacaccactatagagagttacagttgcccccaaacacgaatgctattcccaaataaaatagaatcatgctttgggaggccaaggcgggccgatcacgaggtcaggagatcgagaccatcctggctaacacggtgaaaccccgtctctacta

SEQ ID NO: 309 - DNA, 536 bp, Homo sapiens
ctcttgatgcacgaataaatatctctacatctagcctttgttaaaaataaaaattaatattctacaaacacctacatatactagagaggggtgaaacactgcagctaattcctttataatactttcagatgattgcattaagcctttcatgttatgtggcattgttaatttttcctagatacccatccacttaagggccagagaaatccttattcatttaactctggtgggcatttatgtaacatacccaaataaaaacgttattaaacagccacaatcgcattcagtcaacttggcactgaatgtagcttctaaaatcagttctctaccctacgaatggaatgttctaccaagaaagagaagcatcaccatgtcatcttgtgttctacaccactatagagagttacagttgcccccaaacacgaatgctattcccaaataaaatagaatcatgctttgggaggccaaggcgggccgatcacgaggtcaggagatcgagaccatcctggctaacacggtgaaaccccgtctctact

SEQ ID NO: 310 - DNA, 299 bp, Homo sapiens
  misc_feature (18): n equals a,t,g, or c
tttttttctttttttttntttgagacggagtctggctctgtcacccaggctggagtgcaatggcacgatctcctctcactgcaagctccgcctcccaggttcacgccattctcctgtctcagcctcccgagtagctgggactacaggcgcctgccaccacgcccggctaatttttttgtatttttagtagagatggagtttcacagtgttagccaggatggcctcgatctcctgacctcgtgatccacccgcctcggcctcccaaagtgctgggattacaggcgtgagccaccgtgccc

SEQ ID NO: 311 - DNA, 147 bp, Homo sapiens
gcgggcgcctgtagtcccagctactcaggaggctgaggcaggagaatggcgtgaacccgggaagcggagctttcagtgagccgagatagcgccactgcagtccggcctgggcgaaagagcgagactccgtctcaaaaaaaaaaaaaa

SEQ ID NO: 312 - DNA, 303 bp, Homo sapiens
tttttttcttttttttttttttgagacggagtctggctctgtcacccaggctggagtgcaatggcacgatctcctctcactgcaagctccgcctcccaggttcacgccattctcctgtctcagcctcccgagtagctgggactacaggcgcctgccaccacgcccggctaatttttttgtatttttagtagagatggagtttcacagtgttagccaggatggcctcgatctcctgacctcgtgatccacccgcctcggcctcccaaagtgctgggattacaggcgtgagccaccgtgccccgc

SEQ ID NO: 313 - DNA, 193 bp, Homo sapiens
aaaaatacaaaaaattagcctggctcagtggcgggcgcctgtagtcccagctactcaggaggctgaggcaggagaatggcgtgaacccgggaagcggagctttcagtgagccgagatagcgccactgcagtccggcctgggcgaaagagcgagactccgtctcaaaaaaaaaaaaaaaaaaataggatcatgg

SEQ ID NO: 314 - DNA, 21936 bp, Homo sapiens
taatgtggacacaacatgatattaggctttatttgaatttaaaatcttgattccatccagggacattttttaccgaagcgtctcagagactggctcagggtatttcttgacaagactgtacagggcttctcatcatacacaaaccctccacagcccacggctccaacccacagcacctcctgcagtcctggagggaaaagggacagtaacatgaagtgtctgaagatccatttcacctcttttccatgtgaatcatgacgctttcaatgcatttcttgacaggattctattttgaaagaatgatgctcaatctgtaccttttatgcttcttgtttcttctccatcaataatatgtcagtcaactgcttgtcagagacacttagctgctgacaggtcctcataacctgactcaggtaaactgccaagagatgcttgcactggaatataaaacacacacacctattagaaacaggcagggccagggctggccagtctaaccaagatttctcattaccatcttatttggcaggagaagactagagcatacagattacggggtctctaactgattgtctaaaaagtgcagatgggccgggcatggtggctcacacctgtcatcccagcactttgggaggctgaggcggatggatcacttgagatcaggagttcgagaccagtctggctgatatggcaaaaccctgtctccactaaaaatacaaaaattagctgggtgtggcggtacatgcctgtaattccagctactcaggaggctgagccatgagaatcgcttgaacccaggaggtggaggttgcagtgagccgagatcacgccactgcactacagcctgggtgacagagccagactgtctcaaaaaataaataaataaaaactgcagataaagatgatgagacaggagtattctctttagaaatcagagtggacacagacttactttgcctgctgctttgggaaatggcttagatccatcaggcacaaggtatgtaacccatggtgaaaacccagactacctgcactcctcacgttagtcctaagttatatttcttccttgccttcagaaagctgtcacagcaatggttaacattccttgaggcactaggctgtgaagtgcttctcatagattatctcactgaaatctgacagctccctaggaagacaggtattgtaaccacatgctcatcagagtctctaggctactctctcttttttttttttttaattttaattttaatttttgttttatttatttatttatttatttttattgatcattcttgggtgtttctcacagagggggatttggcagggtcataggacaatagtggagggaaggtcagcagataaacaagtgaacaaaggtctctggttttcctaggcagaggaccctgcggccttccgcagtgtttgtgtccctgggtacttgagattagggagtggtgatgactcttaacgagcatgctgccttcaagcatctgtttatcaaagcacatcttgcaccgcccttaatccatttaaccctgagtggacacagcacatgtttcagagagcacagggttgggggtaaggtcacagatcaacaggatcccaaggcagaagaatttttcttagtacagaacaaaatggaaagtctcccatgtctacttctttccacacagacacagcaaccatccaatttctcaatcttttccctacctttccctgctttctattccacaaaaccgccattgtcatcatggcccgctctcaatgagctgttgggtacacctcccagacggggtggtggccgggcagaggggctcctcacttcccagtaggggtggccgggcagaggcgcccctcacctcccggacgaggcggctggccaggcggggggctgacccccccacctccctcccggacggggcggctggctgggcggaggactgaccccccccacctccctcccgaatggggcggctggccgggcagaggggctcctcacttcccagtaggggcggctgggcagaggcgcccctcacctcccggatggggcggctggccgggcggggggctgacccccccacctccctcccggacggggggctgacccccccacctccctcccggacggggcggctggccgggcggggggctgacccccccacctccctcccggacggggggctgaaccccccacctccctcccggacggggcggctggccgggcagaggggctcctcacttcccagtaggggcagccgggcagaggtgcccctcatctcccggacgaggcggctggccgggcggggggctgacccccccacctccctcccggacggggcggctggccgggcagaggggctcctcacttcccagtaggggcggccgggcagaggcgcccctcacctcccggacgaggcggctggtctaggctactctcttaactactgtgttatacttctggggttggggggcggggagtagtggcaaaactcttgcatatattggcctgtacacacctctggggagatgattgcgttgaatctgatgtcagagaacacagctttagatcttgaaggggttttggttcaatcctgtctcttgcagttgagatacacttagggcacatcagttacgaatgtggcctcttggacaatgctatacccaacttgccagccaggtcccaagatgtttaagaagttaacagtgtaaaagaaagggaaagaatggagtggacatcattattttcttctttcgcaagacttagaaaacagctgcctgctttcaggaaggtagtgttttttcctttggaataaggtgtgtgtgagtatgtcctgtttctgcttcatggtctggactctgatgaaattggcaaaggcttaaaggaataggtgaaggtactcatgccccatgtgaaggtcaagtgtggtgtcaggctgtctcacaggtagtgcaaagatataccacatggctgaaagtaggatatgcaaagttgtcaacatcgaatttagttcatatttttatggggccatctaattccccagtgcccacttctgggattccctttttttccttctcaaagcttcactcatgatcttttacataaaaattcaggaaattgatgcagttctaaaaatgacattgcattttgagaggctaaacccctaagaggtgactaactgaagacaaagacaaaaaactaccatttgtttcaacatataataagattcccattttgtagaatagttaaaccacaaagtaagggcaatttctctctacattcaactacagtgggaagagtcttccccatcctcaccaggatgctgtcactcttccgtagcactgagaatgcaaatgcaggacatgaacagtaatgacaagaagccaaacatgtgtatgttttactggaacttccaaggacctacaaagaaaggatagatgggatcagacctcagatgtgctggaaaaaccacctctttccctttttatttatgtagactcagagttgctctgcaaattgcaccgagaagaactgcagtaatgttttacataaaagaggaaacaacttctcttcctccagtgtacagactctcccttcctcacctctcagtgctcacctttaggacagcatataaaggaactgaagagtttcagattagttcaaccaaccacataaaccattctgttcctacgcctagtgattcatggggcccactctatgggctgactgtaataagaaggaagtggggggggggaatctctcatctacattttattgtgggggttcttaacctttggtatttcacagcaggtgtataaatttctaaagcttcctacatacctaaagagagagtaaaaacaggcaaagggtcagtagcagggcaggagtaagataagtctcaggccgggtgtggtggctcaaagcctgtaatcccagcactttgggaggtcgaggtgggaggatcacttgaccccccccagagttcaagaccagcatgggcaacatggtgagacctcgtttctatagaaaaaaaaatttttttaaagtcaggtatggtggcacatgccagtagtcccagctactcaggaggctgagaagggaggactgcttgagcctgggaggtcaaggctgcagtgagctgtgactgcaccactgcactgcagcctgggtgacaaagatcccatctctaaaataaagataggtcacagaagaacaaaagaagaaactgggaagaggcttttgaaaagcatttgagagcagagagaataaataaagcaaagacccttgcgaaaggaatgactcagctgttcaggatggaggtctcaggaaaagaggcaggcccagatctgcctactcatctagcaggatggaaggaggacactgatacatagtgggttgataagaggcacagtctaacagtcttggtggtggtcaagagggacaaaaaggagaggtacaggagaaacaagacacatctgtagtatgatcgcacaaatttgctggagaaatcctttgtttaagtctctctaccaccaagcagccaaaaactttttgttgaggtcttcattcctagagttaacttcccacctggaggcgtaagattattattagtatctgagggaagcagaaatgtcctgagggtgattttataatgaactgccacttaggaatttgccacacagccttcaaagcacttttaggctctcagatggcaatctaaatgaaaaagcaaggacttttaaattttttttgaattacaatgttagcactcctaggattctttaatctttcttacccacagagaataaagctacaggtatggtttgactgcaagaacaaacagcaggttccactgctgtgcttttgtcacattttcagtggttcatataatgcagttatcccagtacagcttttattaacatttttttttaatttttgttttttggagacaggatgttgttctgtcatccaggctggagtacagtggcagatcatagctcattgcagtcttgaatccctcggctaaagtgatcctcccacttcagtctcctgaggaggtaggagtactggtgtgcgccaccaccctatgctaattttaaaattttttttgtagagatggggtcttgctatgttgtccaggctggtctttaactgctgggcttaagtgatcctcccaccttggcctcccaaagcactgggattacaggcatgagctaccacacccagcctcagtatggttttttgacgcagtcagaattcctcgggagattttaggttaccagaaatagccaatgattgggtaagaagatgcctactgaacacattcaagatttcagttcaggccgggcatagtggctcacgtctgtaatcccagcactttgggaggctgaggcgggtggatcatgaggtcaggagttcaagaccagcctggtcaatatggtgaaaccccatctctactaaaaatacaaaaattagccaggtgtggtggcgggtgcctgtaatcccagctactcaggaggctgaggcaggagaatcacttgaacccgggagacagaggtggcagtgggccaagactgcatcactgtactccagcctgggtgacagggcaagactctgtctcaaaaaaaaaaaaaaaaaaaaaaaagatttccacccagttacaaattaggtgttgaaaaagcacaccttgcatattacctactgcaaggctctgatgtgttatgaacatatcaccgagaccattcagtatcaatggagagatttccccagcatgtgtggaagcttacactgaaggaagagcattaaagcagattgttttctacttaatcctaaagaaaaaacccacaacatccagcagtgacatgtataattcttttttttgagacagagtttcattttgttgcccaggctggagtgcaatgatgcaatcttggctcactgcaacctccacctcctgggttcaagccattctcctgcctcagccgcctgattagctgggattacaggcatgtgccaccatgcctggctaacttttgtatttttagtagagatggggttttgccatgttggccaggctggtcttgaactcctgacctgaggtgatccacccgcctcagcctcccaaactgctaggattccaagcatgaaccaccactcccggcctataattcttgggtgtctaaactattaccaatgaatacaactttaggtttcttctccctttagttatctcgtctcttctctctagatttaaacttaagcaagcagaagcctctgggattctgtactgactagaataattcactgcttccttcttattgcgagtccccgtccatcataatcctccctggatcatgctgaataaacagctggtgacttgagatggggagaaattctacagagtttccttgcctgagcctttcaagggctaagactcaaaatgttcaactgcctaaagcaataaacaccaaaagaggttaaatttcgaatttgcttttcgcttatctagcagtggacaactaatgaacccaacaatcaggcaaaatctgagttagaaacatttagaactggaaattgaccttaaggataacataattcaattccttcacccttcagtgaaaaaacaacttcctcttacaggaattgctcctagttttcccgcttatagtctggaatgtttatccccagaaggagagagctttttaaaaaaggaacatgctggaaagaggatactcagaccatggctgacagaacttgtaggaacctcacttggaggtggtttctactgtggttctactgtggtttcagttaggtcgcaaggagaggtgacccatctacatggtcatccattcatgggtacagttttattttatgaccgctccaagcctcttaggacactccacagtgtctttgttattgttccttgtgtttggtgcttctctctgaaaacaggattatacattcctggcctgttaaatacaggctggccatgtgacctgctttagtaaaatctgagtagccaagcgaaaaatgttaaaaattgtgtaccatgttttcctttttctctttgagattcacagtgttccagatatgggctgctttgcccactgggatccctgcatgaagctgttttggaacagagctacagctggctcctggtggatacacagcatgaatgagatctaaaactttgtttttgtaagcctttcagatttggggtcattgataccacagcataacttagcctctcctgactgaaacatcctccttattaagtgaatcaaaaaagtataaaaagtggccaggagtgcaggctcacgcctgtaatcccagcactttggaaagcaaaggtggtggatcacctgaggtcaggagtttgagaccagcctggacaacatggtgaaaccccatctctactaaaaatacaaaaactagccaggcgtggtggtacacacctgtaatcccagctactcaggaggctgaggcagaagaatcacttgaacccaggaggcagaggttgcagtgagctaagatcatgccaatgcactccagcctgggcaacagagcgagactctgccttaaaaaaaaaaaaaaaaaattatagaaaacaactcaggtgtcagcaacataacaatgactttagaattatttcacattacatctggagaacaataatattagagttgacctatgggatgaagaatgacctatgaaaagataactagctgggcactaaggcagtatgtgactcaacttttatcatctcatacaactcctgaattcagccaaattcttactatattaccatacaatgcaaccattaaggttaatttgagggtgtataagatttctacagcctcatttaattcaaagtccaagatgacagccacaattcttggaagttagtattttataattaataaagcaatgtaatatataccagatgtgaacgacaaaaactaaaccagtgacttaagttactgttgaccaatgggaggaacaaaaagtcaacagtaattaaactatttcaaacaaaagtctacttgccaggtcaagtattgtgcccataatggaatcaagaccaaatatcccaaactaaaagcaatgggaaaaacttgaaggtccctctagtttcgggtattttagctacctaaaaaccaaaaataaaaacaccaggaaagaggacagacacacctcctcaggtacaaactgcaagttcagtgactttgattattcctaagttctccatgagaaaattcatctaataattggcagtctcttttgagtaggacaataccatccaagtttttttttgtgtttttgtttgtttgtttgttttgagacagagttctgctcgtcactcaggctggagtgcaatggtgcgatctccgctcactgcaacctccttctcctgggttcaagcaattcttctgcctcaacctcccgagtagctggaattacaggcacctgccaccacacccagctaatttttgtatttttagtagacacggggtttcaccacgttggccaggctggtcttgaactcctgacctcaggtgatccacctgcctcggcctcccaaagtgctgggattacaggcgtgagccaccacgcctggccatcttattttagttacaaaaatttctggaggattttgttaagtgaaactatgctaagtgaaataagccaggtacagaatgacaaataccacatgatctcacttatatgtggaatctaaaaaaagttgaactcataggctgggtgcaatggctcatgcctgtaatcctagcactttgggaggctgaagggggaggactgcttgaggccaggagttcaagaccagcttgggcaacatagcaagaccctgtctttatttaaaacaaaaaaaaaagttgaactcatagaaaaagaaatagtggttaccaggggccttggggtgggggaggaagaggaagataaggagatattggtcaaagggtacaaaatttcagttaggagaaataagttcagggtatctatggtacaacatggtgaatatatttaataacaaagtattggcggggatggtgctcatacctgtaatcccaatattgtgagaggccaaggtgggaggatcgcttgaacctaggagtttgagaccagcctgggcaacatagtgagaccctgtctctataaaaaccaagaaaaagactgaagtactgtatatttgaagattgctaagataatggattttaagtgatctcaccacaaaaaaagaagtatataaggtattagatatgttaattagcttgatttagttattctacaaggtatccatatatcaaaacatcatgttatataccatgaatatagacagtttctgtcagttaaaagtaaataaaaattttaaaaaattatcaattcgttaattttaccaagttggggcaaaagccttttaacagtccaggaaatatttaaagctagtcaacagcttctacagagatgaagaacattttgtcctaaggggtttctgtagggatcacccccatctctagacttctacctggtaaacacgccttccactgggtgatgagattaaggtgatggactgtcgatcaactaggtccaaggcctgggtggctgatgagccaaagagaaacttcagcctgtgaaataaaaacacttcagattagaaggcctgattctcaaagtcacctcagtaacttgcccaaaggatcactagacttagtattttttaaaaattcattttaattttgaaaaaaggaaaataatacagcaaaacccatggacccattcactccccagaattaatgttaatatcttgtgtacttatttcagatcttcttgtattatgtatatatgtgtgtgtgtatatatatttatttattattattattattttttgagatggagtttttcttttgctgcccaggctggagtgcaatggcgcaatcttggctcaccgtaacctctgcctcccgagttcaagcgattctcctgcctcagcctcccaagtagctgggattgcaggcatgtgccaccacacccggctaattttgtatttttagtagaaacagggtttctccatgttggtcaggctgctctcaaactccagacctcaggtgatccacctgcctcggcctcccaaagtgctgggattacaggtgtgagccactgcgcctggcctgtattatatttttaataaagggagtaaactgttagtgataaagaagccctctttatacttctctgtagtgcatccttcttcctaccttccccttatccctgaggcaagcacatgcatttgttggtttccttcctgttaatgtgttcatattaaatattatatatagaacatatgtatgcacacatacataacaaacacacgtgcatagatgtatgcatatacatatatagtattgttttaaaacataaaaggtatattgtaggcttctttttgctgttcctgaaatagctcatgaaaaataaaagaaaatataaaatatcgtagacttcttttggcaacttgcatttttttactcaatgcatttttgaaaatgaggcatgttgacggacatttatttttactttacctttgaataatattccattatatgtatacactgaattttatttaagtactctatgtatggacattgtttccattttatactattataaataatattcaattatccccatacatgtcccttggcatacatctctgaaaatccccctttagtttatgtaactaaagcatatgttcattttcaactttaatagatattgccaatagctctccaaagtggaaacaggagtggtggctcatgcctgtaatcccagcattttggaaggctgaggcaagaggatcacttgagtccaggagttcaagaccagcctgagcaatgtagtgacaccccatctctaaagaaaaaagaaaaaaaaaaactaaaacacacaaaaaagtgaaaacagcactcccaccagcactgtataagacttctattttctcaggccgggcgcggtggctcatacctgtaatcctagcactttgggaggccgaggcaggcagatcaccagaggtcaggagatcgagaccatcctggctaacatggtgaaaccccgtctctactaaaaatacaaaaaattagccgggcgtggtggcacacgcctgtagtcccagctactcaggaggctgaggcaggagaatcgcttgaatccgggaggtggaggttgcggtgagccaagatcgcgccactacactctggcccaggtaacagggagactccgtctcaaaaaaaaaataaatgaaacaaacaaacagaaaaaccaacttctactttctccatgtccccactaacaccagtattatcaggcttttttatgttgcccatctgaagataataaatgtgtactttttggattagtaataaggctatccaactgttaaatgatatacaggaaaaaactttgatatgtgagaaaattcttataatattaggtgagaaaggttgaagacaaaattatattttaggaactctcaagcatgttaacttttttaaaggaaacctacaattatgtcaaaattaaaagtttaattttttttttttttgagatggagtctcactctggtgtccaggctggagagcagtggcacaatctcggctcactgcaacttctgcctccggggttcaagagattctccggcccagcctcctgagtagctgggattataggtgcaggccaccatgcccaggtaatttttgtattttttagtagagatgggcttttgccatgttggtcagggtggtcttgaactcctgacctgaggtgatccccccgccttggcctctcaaagtgctggggttacaggtgtgagccagcgtgtctggcctttttgtttgtttgttttttgttttttgagacaaagtctctctctgtcacccaggcaggctggattccagtggtgcaatcatggctcactgcagcctgaaccccctgggctcaagtgatcctcccaccacctcagcctccctagcagccgggactacaggtatataccaccacatccagttaattttttgattttgtggagacagggtctccctgtgctgcctaagctggtctcaaactcccagccccaagcgatcctcatattacaggcgtgatccaccatgcctggccaaaatttaattttttgaaaaggcaataaaccggccaggcgcggtggctcacacctgtaatcccagcactttgggaggccgaggaaggtggctcacgaggtcagcagatcgagaccatcctggctaacacggtgaaaccccgtctctactaaaaatacaaaaaattagctgggcacggtagcaggcacctgtagtcccagctacttgggagaccgaggcaggagaatggtgtgaacccgggaggcggagcttgcagtgagccgggatcgcgccactgcactctagcctgggtgacagagcgaaactctgtctcaaaaaaaaaaaaaaaaaagcaataaaccaaaatttaagagtgattattactgggtggtatgattattgatgctttttataggttttattttccaataaaagttttttataagtgtgggttattattattattattattattactgagttggagtctcactgtgttgcccaggttggagtgcagtggcacgacctctgctcactgcaacctccacctcccagattcaagtgattctcctgctttagcctcccgagtagctgggattacaggcgcatcccacctcccaaggtgctgggattacaggcatgagctaccacacccggcctaagtgtgggttatttttataaactagaaaataaaatggcagggttaaactcaaactgaaaagttaatgttttaaagaacttatatgacttaacacagagtaagacaaacctagtaaggcttcaaaattaaaatgttcaacttcttacttcattttccaacaaaccagccacatatacaacaaattattgggggaaatagaaaagagtgctttgaatttttatattaaacatatgaagatttagtctataaaataacaaaatacaaaaaacaatgaaataaaatttgtcgggaaccttaccaatcaatctcaacagttacctttaagaatttttttaaggccaggtgtggtggctcatgcctgtaatcccagcaccttgggaggccaaggcaggcggaactcctgacctcatcatccacctgcctcggtgtgtgccacctgtagtcccagctactcaggaggctgaggcaggagaatcactggaacctgggaggcagaggctgcagtgagttgagatcgcgccactgtactccagcctcagtgacagagtgagacactgtctgaaaaaaaaaagaatttttttaacctgctctgtccactttaatacctactgtgaacatctcttgaatgcattaaaaatttttccatatcacttttaatggttacaaataattctactgtaaagatgaatcatttttattctcctcaaactccatgaattgttagattgtttctatgttttattgctaccataaacaatactggatattcatcacactgagaatatcctcactgtaaaatctttacaaacatctataattacttcctgggtatatgttcttttatgtggaatttctgggtcaaagaatatgtatgttttaaagttcctattgcctgttaccctgcaatttacattcctgttataaatgacccctttccccatatttgtgtcaacttcttttctgtggtcactaattttctagatgaaaagttatgttatgttaatttgtatttttgtggtcactagtaagatttgtctttttcctcccaaaggattcggctatttacatcttttattctttgcccttttgtttttaaagtagtacatttttttccagtaatatttaattcttattaaaaatttaagaaatacagtaaaggttaaggccgttccctcaattctacctccttccttgccccaaagaaaaaacactggtagagcttggtatatattcttcagaacttttatttttttagagacaaggtctcacatcacccaggctggagtgtagtggcacaatcatagctcactgcagcctggaacttcagggctcaaacagtcctcctgggacaggttttgtttttttttgtttgttttgttttgttttgttttttttttgagacagagtcttgcctctgtcacccaggctggagtgcaatggcatgatctcagctcactgcaacctctgtctcctgggttcaagcgattctcctgcctcagccccccgaatagctgggattacaggtgcctgccaccatgcccggctaatttttgtatttttagtagagacggggtttcaccatgttggtcaggctggtctcgaactcctgacctcaggtgatccacccgcctcagcctcccaaagcgttgggattacaggcgtgagccaccgcacctggccaggatttttaaatgtaagtgtgtatcagtaattaagtattacttatacctaggtagcttttacttttttggtctctgcatttttaaaataactgaccactctatattattctcatttaagtagttgtatcaactgcaaataatgataattgtctttccttgcagataggtacatttgtaatttctttttcatgtgttagttgaacagctacgctttttttttttttttttgagatagagtttcgcttttattgcccaggctggagtgcaatggcatgatcttggctcacagcaacctctgcctcccaggttcaagcaattctcctgactcagcctcccgaatagctgggattacaggaatgcaccaccatgcttggctaattttgtatttttaatagtgacagggtttctccatgttggtcaggctggtcttgtattcctgacctcaggtgattcgcccgtctcggcctcccaaaatgctgcgattacaggcgtgagccattgcgcccggccaacagccacaatttttaaaacaatgttaaataagagtggcaaatatgacaatactggatatggtgttggctattcaattgagacaaatttttaagaatcatgtcaagaaaatattattcctagtttctaagagtattttttattttttattttttttgagatggaattttgctcgttacttaggctggagtgcaatggcacaatcgcagcgagatatgcaaccacaacctcccgggttcaagcaattctcctgccttagcctcccaagtagctgagattacaggtgtgtgccaccacatcccactacttttgtatttttagtagagacagggtttcaccatgttggtcaggctggtcttgaactcctgacctcaagtgatccacccacctcagtctctcaaagtgctgggattgcaggtgtgagccacggtgcctggccttttattctatttttaaaattattttcgtagagatggggggtctccctattttgctagagctggtctcgaactcctgggctcaagcaatcctcctgcctttgcctcccaaagtgctgagattacatgtgtgagtcacagtgcctggtagtaagaatatttttattttttattttatttatttatttatttatttatttatttatttttgagacagagtctcactctgtccccaggctgaagtgcagtggcatgatcttggctcactgcaacctccacctcccaggttcaagtgattctcctgccttagcctcctgagtagctgggactacaggtgcccaccaccacgtccagctaattttttgtattttcagtagagatggggtttcaccatgttggccaggatggtcttgatctcctgacttcatgatccactcaccttggcctcccaaagtgctgggattataggcgtgagccactgcgcccggtcaagagtatttttaaaaatcaagagttgatgttgaaaggattttaacattaatggttaaaaaaaaatcaaatacaacagtatatgtacttacgataacagatattcatcaggaactgtaaaatgagaatggaaaaaaaaagttaatcatattaagcagtgaccattgacataaaaatcttaaaaaacactgtaactaaaaacacttccgtgtgtgatggtcaactgaacctatgcatctggttttactccttccccaaaccccactaaaaccataataaaaggatttcctttttctttttttgagacggagtcttgtcctgtcacccaggctggagtgcaatggtgcaatctcagctcactgcaacctccgcctcccgggtttaaaccattctcttgcctcagcctcccaggtagctgggactacaggcatgcactaccatgcccagctaattttttttggtatgtttagtagagatggggtttcaccatgctggccatgctggtcttgaactcctcacctcaagtgatccactggccttggcctcccaaagtgctgggattatagacatgagccaccgtgcccggccagatttgtttttaaaagtatgaattccaaaggatgagaaagacagggagaaacaacagccatgatacattggaagctgatagaagagtggaaaatgatttataagacctaagaaaactgaatcctaggccagcaatggggagagtcaagcaccagcctgagttacactccaaaatccacctctccccttccccaaaccctaacgaattggtggcaccaaatagcttcattaggggtgaaacagggatatgaaaataagactcttttcgagtacgtttgagaagtagtgggaccccagttccctccacagctttaggtgactgcctttccctcattctggcaagagactaggtttattttctggagaggttcaaacacaggctatttggactagggaaaaatactaggtacagtgaaagtcagggtgtcacactgaaaacaggatctcctgctctcttccctaacatggctcccataacacaagcaatcaggccttcacacttcagccaggagactggaagtcttccctaggtataccccaagagaagtgggaatgacactgaaatggtttccccaactaaatagcctactgagaacaactatagtgacgttcatattccgtaagcccctctaccacccagagcttccaatatactttttagtcttccactctgaaatatgactagacagccaagggttaccagacaacaaaggaaaaaggaaatagaataaaacaaacagaagaaagttagaggaaaaactgcagaaaggagaaaattttaaacatctattactaatattttatcatcagaaaaaagttaatgcaatcataaaacaggcacaaaaacaggcagaaggcataataagaagaaaaagggaatcttctgaaaaaaagttataaattaaaaatacatggtatgtctctgtagtttcagttacttgggaagctgaggcaggaagattgcttgaaaccaggagtctgaggccagcctgggcaacacagtaagaccccgtctctcttttttttttttttgagacggagtttcgctcttgttgcccaggctggagtacaatgacgcaatctcggcttaccgcaacctccacttcccgggttcaagcaattctcctgcctcagcctacagagtagctgggattacaggcatgcaccaccacgcccagctaatttttttagtagagacggggtttctccatgttgatcaggctggtctcgaactcccgacttcagatgatctgcccaccttggcctcccaaagtgctgggattacaggcatgagccactgtggccggcaagaccctgtctcttaaaaaaaaaaaaaaaaaaaaaagacagcagaaattcaacagaaaatctggaagataaagttcaagaaagttcccaggaagtagagaaaatataaaagcaacacagaagccacagtaagtcaaccagaaggacaacagaggacatccagtaacttaattacagaaataccggaaagaacagagaaaacagatggagggaattcatcaatcaaataattcaaaattccccacagctgaaggacatgaatttctagcttgaaagggcccactgtgtgcccacactgtgaagtgaaaaaaaaaaaactttatcagaagattcagaacactggttatgaagaaaacataattcaaacttccagagaaaaaaaaggtcacatacaaaaatcaggagtaacactagaagctaagatgtagtggaaaaatgttttcagatgtctgaagaaatattatttccaacaaataattcaatacctagacaaacaatcacttaagtgtaagggcagaaaaagaactttttcagccgggcgcgatggtcagcctgactaacatttagtatctctactaaaaatagaaaaactattagccgggcatggtggcgcatgcctgtaatcccagctactcgagagactgaggcaggagaatcccttgaacccaggaggcagagggtgcggtgagcagagattgcaccattgcactccagcctgggcaacaagagcgaaactccgtctcaaaaaaaacccaaaaaaacaaaaaaaccccacaactttttcagacataagcctcaaacaggggccggtgtgggggctcacaactataatcccagcactttgggaggccaaggcagaaggatcgcctgagcccaggagttccagagtagcctgggcaacaaaggaagacccgtctctacagaaaataaaataatcagctgggcatgaggtgtgattgcgcaactgtactctagcctggggaacagagtgagacccggtctcaaaaaatagaaaagaaagcctcaaaaggtacatctcatgcccccttcttcaggaagctggcagagtctgtgtgccataatataaggtagtaagcctgggcaacacagtgaaaccccgtctctacaaacaatacaaaaactagctgggcatggtggtgcacacctgtggtaccagttactcaggaggctgagacaagaggatctcttgagcctgggaggttgagggagcagtgacctatgattgtgccactgcactccagcctgggtgacagagcaagaccttgtctcgaaaaaaaaaaaaaaaattttacatgggccgggtgcggtggctcatgcctgtaatcctggcactttgggaagccaaggcaggtggacctcttgagctccagacttcgagtccagcctaggcaacatagtgagaccttgtctctacaaaaaatacaaaaaactagccagctgtggtattgtgtgcctgcagtcccagatactcacttgggaggctgaggtgggaggatcatctgagcctaggaggtcaaagctacagtgagctttgatcatgctattgcacatcagcctgggtgacagactgtctcaaaaaaaaaaaaaagaggtagtaaactgagaaaaagaaaactgtaggatatactaaacataggacccaacaaagatacagagaattcccagataataatggttaagagagatctcagcaaacagccgagagatcagccagtccatattaagcaagtccgaaggctctagagatgtcttcaggaaggtgaaactgataacatacttcgttcatctgaacatcttgaggggagattgagaacactagtaaaggatgtgaggttaaagtaggaataaatatgtaaaaaactaaataagcacataaacaaaaccaagatagttgtaactccagggaaatccaaaagttacaaagaaaacaaaaagtaatcatagcttcctacatggttccactgtgactagtttatatatcatcatacaaataaaacttggaatcttgatctaaaaaaattaccactgaagaatgggggttaggaagggtgcataactatatattaatagaaaaaagattttgaaaaagacagaaaacagggcttctgaaaataaacatgaatcaacagcattggttcctgtgtctgaaccatgggtgtcaggggcaatgattatgcccccttcaggactgtcaatgtgtcttgtgaaccttcttgttggagggaaaaaacccaaaactggctgggcacggtggctcacgcctgtaatcccagcattttgggaggctgaggtgtccgtatcacaaggtcaggagtttgagaccagcctggccaatatggtgaaaccccgtctcttctaaaaatacacaaattagccgggtgtggtggcatgcgcctgtagtcacagctacttgggaggctgaggcaggagaatcacttgaacttgggaagcggaggttgcactgagctgagatcgcccattgcactccagcctgggagacagagcaagactctgtctaaaaaaaaaaaacaaaccaacccaaactactgtcagtgtatggattaacctattcagacacagaacagttctggcgattattgtttaaagtgacagcattccaaaccctcaggccatcaaatctgagagcccagaacaattgtataagctaacatcagttggcttttttcccatcctttttggaaacaagtatgtttgaatacttggctgcactaatctttcaagcacatatacttaagtctccttaattttgactgagatgaggaaacaaagttggcttatttttctcagttccttaaaaacagtaactcaagataaaccctttcaaaatgcagtacagtacttttaaaacaaaagccatccaagttgaataagcgatggcagtttgggggcctgatatggctgttatttataaggtggccatttttacatcctaagagtagttcattagtcaatgcattttgagtatatcaaatttgatttgatcttatcctagcatactctgaacacatcttgagatcaacccttctcaagtgattttggtgagcatagccaaagagtaccctctgctggtcagaaaaaaaatggtgctttcacaatacccagatttactccaacgattgcatatgcatttaggttttgtggctcttaaaatgcttttttttttttttttgagatggaatttcgctcttgttgcccaggctggagtgcaatggcgcgatctcggctcacggcaacctccgcctcccgggttcaagcgattctcctgcctcagcctcctgagtagctggaattacaggcgcccgccaccacgcccagctaattttttgtatttttagtagagacgaagtttcaccatgttggccaggctggtctcgaactcctgaccttaggtaatccaactgcctcggcctcccaaagtgctgggattacgggagtgagccactgcgctgggcctactttttaaagtgtatggaagcattaactttaatgttaacatcagaatttgagaaaaagaagtttaataattcaaaatttcgtgtaaaataatcaagaactccacgtttctatcactcactgtaggctcccgtcccttccacccccgggcggggacccctcccagcgacccggccagctctcagcacttcggtccccactggcctactcgctccgacggaggggctcctgcaactgcgctgtaccgtaaatatttgctgaatcgatttgacttttacttgttccaatttcgcttttttgttgttttgtttttttgtctttttacgaacaagaggtttagagaaccacatggaaaaaaggcagggccaggcccggacaccccgcctcctgcctcccggcccggcggtgcccggatgccccgcccgcgcccatggcgcagccacacacgacctcggtcccgtacttcgcgcgctctcctgcaccgccgccgccatctcgctcaggagctcctccacaaccgccggcaacactacggccatcgcgccgcaggacacgccctccacgaccggcggaccgccgcgacgctccagctgactgcgcctacctg

SEQ ID NO: 315 - DNA, 323 bp, Homo sapiens
attccaaccttttaaaaattactagtaattcagttagttacttaagactaaatagggtcaggcgcagtggctcatgcatgtaattccagcactttgggaggtcgaggcgggcagaccactaggtcaggagatggagaccatcctggctaacacggtgaaaccccatctctactaaaaaaaaaatacaaaaatttagccgggcatggtggcgggtacctgtagtcccagctactcgggaggctgaggcaggagaatggcgtgaacccgggaggcggagcttgcagtgagctgagatcacgccactgcaccccagcctgggcgac

SEQ ID NO: 316 - DNA, 7444 bp, Homo sapiens
gtcctgctcagtcgtcagggcccggccaatccggagggcgctcggcgcgtggtcgggggccaggagcgcgtctggcctgcagtgcgcagaggacgcggcgggagcatgttccggctcctgagctggagcctgggccgaggcttcctgcgggccgcggggcggcggtgccggggctgctccgcgcgcctgctcccggggctggcaggaggtccggggcccgaggtgcaggtgccgccatcccgagtcgcgccgcacggccggggcccaggcctgctgccgctgctggcaggtgaggggcgcgggccgggcggggccggccgggcggggacaggggcgcgggccgggcccgatgacctcagagccccttcccgcagcgctcgcctggttctcgaggcccgctgcggcagaggaggaggagcagcagggagccgacggggccgctgccgaggacggggcggacgaggccgaggcagagatcatccagctgctgaagcgagccaaggtgaggcggctccgggccctgcgcccggccgagcgcggtagcctttgtgagcggggtcttggcgttgctgcgcattactctctccgcctcgccgaagagtggatggaggctccgcgggtaaaattgccgagaatgaggtgggtcatccgagaggggattggaatccatccaggcttttccgactctaaggcctgcagtaaaacctctgcagtgtcaagtgcaaatggagatggcgccctaggcatcacgctttatgcaaacgaaatatcgggaacgttttgtagtggttttatcaattaaccagcctatctgaaatgacataatttcgcacgtatatagcggcctgaaaatggcaacttagtgttggttatgcggttcggttctcctcctgaattcttccttttctccacatccttttctatttttttttcctcctcttttcccaagttatctcatctcttccattgagctaaatacctactcgatgccaacaacgtccaaatttgtatttccattctgtagtgtgctactgacatgccatttgcactttaggaccatacctacctctcagatttaacatgcccaaaactaaacgatctttaatgcctcctcaacatacgctttcgccatctctttactaccatcagtttttcagcctaaaaacctcatagtcattcttaaaacttgtggtaccttaccattgccttccaatacacttacagtccagcaacaagtcctgttgccaacaaatgcaaaatatttctcaaatctttccccttttgtctatctcccttgctgtcaccctagtgcaaaccatcattgccaccaactatgctccagtagtctttcctggcctcctggcctcttgcaatctattctccatgcagaaaccaaagcgaccaaaaaaaaaaagagtaaattggattatgtcatctccttgtcagaaagctctgaatggctacccactgcatttatgataaaatacaaactccttgccttggcttgcaacaccccacatgatctaaaccagcatataccttgcccacccatttggcagtaatcctctggctcaccatcctcccttcacatctatttctttgcatttcttcctcaaaaccattctcttcagcttgtagggacttcactcattctctaccctctgtttgagtcattgttctccccaggtccttatttggttgactcattctcatccttactacctcagtttagctgtcacttccttggaaggcttccctaagtcctatttagaggagaccccttatcattcctttctgtcatctttatagctcttatcattagttgtaattaagcttacttgtcctatatggtcacctccagcctgcaagaaattagaaagaggatggaggacaagcagcttccttataaaatatgttgtaagatcacattccttctgcctgtgtctcttggccaaaacttcatcagatggccacacctagctgcaagggaggctgacctccctgtcatctctgtagacaatgctttgtacatagtaggaattcagtaaatgtctgatgaatgagttagcttccttctatcagttgggatgtacagttgcatacacttctgtctcttagcatatgcatctactatatgtttcattttctattattttgtcttcccttttcagttgagcattatgaaagatgagccagaagaggctgagttaattttgcatgacgctcttcgtctcgcctatcagactgataacaagaaggccatcacttacacttatgatttggtaactcttataaccagtctgaaccactgatgaggaaggttggatgggagggaagggtagttagttcttctgatttatattcctgactttcacgatgttctaaaactccttttctttttactgagttttcttttggcttcagtttcattttttgttttgttttgtttttttgagatggagcctcactctgttgcccaggctgcagtgcagtggcacaatcttggctcactgcagcctccgcctcatgagttcagacgattcttttgcctcaccctcccgagtagctggattacaggcatgcatcactatgcctggctaaattttgtattgtagtagagacgaggtttcaccatattggccaggctggtctcgaactcctgatctcaggtgatccacctgccttggcctcccaaagtgctgagatttcaggcatgagccaccacgcccggccacagcttcagtttttttacccttggggtgacataagacctctcaattccagaccaaaaaaaaccagtatcattagcatgtttttttaatgatgagtggacctagatttggtttgttaacaacaaagtatgtgcaagtatttaattctcacatgattgctgtcctgtgcttcttcttgcagattaattggtgatgtgcttttcattttcaactattttttaaattttgagggtgaaagcaaaagggaattttaaagttttgaaataagtaggaacacagtattctaaactgaaaaacaatttgtaatttgctttcagatggccaacttagcatttatacggggtcagcttgaaaatgtaagtaaattgctttgtaatatcttgaatttatgaaggagtagcttcaagggaactgtaatagtaagagtacaggctaagctgctataacaaagagaccctagaatatagtgactcaaacaagataaaagtgtatttctctttattgtgttagtccagagataggctaaagactgaaggcagacagacataggcacctttgctctctgatccagaagtccaggtttcttctaagataagccctcctctgcctaggtgagctgactcacctccagtctgcaggaagggggagaagatggactgtgagcagcttccttataaaacatgattagaagttcacgttctttctgcctgcatcccttggcctaaattttatcatatgaccatatctaacttaagggtgtccaatctgctaaaattgactgaattttttttttaagataaggtcttgctctgttgcccaggttggagtgcggtggcttaatcatggctgactgcaacctcgacctgccaggctcagttgatcctctcacctcagcctcctgagtagctgggattccaggcgtgtgccacaacacttggctaattttcttatttatttatttatttatttatttatttattgtagagacgggatttcaccatatttcccaggctaaatcgaggggactctgtaatcaaaaagatggagaagagaatgactattaggagacagtttgtagtctctgccacagtgggtttggataagaacttaatctctgaggttgttttctactcatcagagagtagtttaaggtacacagaggatgttgagggtcctgatattttgatctgttttcgcttcaaaagggtacttttctgtgtgtgagtgtgcgtgtgtgtgggtatatgggttttacaaggaatgttgcatcagactggcacttagaatccagggtcatatatatatatataaaatggggcccaattaaaagaaaaatcttttccttatgcttttaggctgaacaactttttaaagcaacaatgagttacctccttggagggggcatgaagcaggtaaggacattgcctagtattggcccctcactgaagcagttttcaaaacagtcttgtctcctgaaaactcctcctagccccaccacatgctttggtcaggaaaggtggagtttcccttctgagatctctatacaaattgccattctttcactaaatgcaacagcatgcttgccaaggaattcacagttggctcatcactctaaaagaataaagactgtggctttgaggccaccgtcagtctggaagttgatctgaaatatgccatgaaaaaatttacttgttatgagttcccttcattctctttctctcacaggaggacaatgcaataattgaaatttccctaaagctggccagtatctatgctgcgcagaacaggtaagtacagcagccagggagtaggactgtgggcaggaaactttgactctgggatgttacataatattcattgtctactggtcatctgggtctcccagaaattgggtgtcacactcaaagtgttccatccctcatctttgaaattgtcagtctttttccagtttgcccctactgtttccatcagcctgcctagtggggcacacaacatctctggctgccctgtgacaaaactaactaagttttctgttgctgcttgaagtgggaagggaagttagagttagaactttagtttaacttttcctagaagaggaaagagcagtgtgaaagctgctggggataatatattaatactctgaagaagccattttgctggtataaatagagttcaaagatgaagcatctaggttgtaagcagagaactcctctagagagttgtatttgggatgaatttagggagagacctaagactagcttcccttcaggttttagtggtgcagaagttggtgcgagaggtttggagtgacatggagcctgatgctgtagaaagggtgctcactgaggccaggccctggcactgttccctactgtcctactcaccagctcctttgttctcatcaggacctgcatagtctccttgcattttgattggacactagataggctagagcttcctggagcctttgacttcaagtcttttgaggagctttgagcttggcccatgccagggaacactgcagcttggtcaatctttcttggagttgtaacaaacatgcctagttcttgattgggtatgaatccctagggtaagaagaagcccagagcctaataaacattgttgagtaagacaaattcatagtcttctagaggtgaaagctagtaacaattagcctctgagttacatggtactctgtacttttcattttgttttattaagagaagcatgagactagaaaagacatggccagatctgaggcttcgaaaggctgatataggttatgaggggaattgtttgtagacctcttgctccgactgggagcgtcttctgggcagtgtccacttgccctgtgttatggctagagagggccctcttgccaagttttgagcgtagggaaggaaggggatgcttctgttcttctgagaacagagcagaacagtagggtcataagttctcccctggcaaagcactagagaacaggtgagctttttagtgccacttctgtaagaaactagagccaaaactgaagaaaagaaccaaagctgagctcctaaatggagaagggatttctgtcacatttcctctgcatctctgtaaaaagcagcagtcagtcggcctgcttgggttgactcaaccctctccagttgattgagggtccagggctacagagttgggttaaatgacttctattgccatagctaggagtcccatttctgcaaaagaaacttttatcagagacttatagcttgaaagaaatataaaatgactaaagctcctcagaagctgtatgaggtcaacagttggaatcctcactgtagggcggcctgaactgtttagggtagtattactttgaacaggggtaaggctttcacacatggagaagttgattcactggaggccatctgttagtgggagatgatgaatactgctggctatgtcagttattaaaattagggcagcattcctagctttttgtgtcctaagttatattaaatggatgacttaaaaaaactgctttgagaaatggcagatttgacactacttagactttaagcaaagttccctcttcccattttacacttcctttactgataatgtttaaactgagctggaaaaatgaagataaaaagaatttgtgaaaaggtaaatgggccgggcgcagtggctcacgcctgtaatcccaccactttgggaggccgaggtgggtggatcacttaaggtcaggagttccagaccagcctggccaacatggtgaaactctgtctttaccaaaaatacaaaaattagctgggcatagtggcgggcacctgtaatcccagctattcgagaggctaaggcaggagaatcgcttgaaccccggaggtggaggttgctctgagccgaggtcacgccattgcactccagcctgggcaacaagagcgaaactccatctcaacagaaggaagaaaaaaaaaagaagaaaaggtaaatggctgattattgattttgctttacagacaggaatttgctgttgctggctatgaattctgcatttcaactctagaggaaaaaattgaaagagaaaaggaattagcagaagacattatgtcaggtaggaaacccattatctgggcattgccttttctccacaaaaggctttactttacacttttgagaaatggaaagagatctaaattgggaagagggaaagttacctattttgcaaaataagtgtctgtctttaaggtatcagcagaagttttggaataagatgttttatttaaaatatttgactgctgttttggtggtggttttttttttaacccccttggtaacatggtcataatttatttgttaacttttagttacatataacttaaggaaaattggggagcagaaggagaaggtgtttctcgtatctcttagttcagctaccaatcaaaatgcttattacgttttagccctagatatacagcaaattaagaaagaagagaaaaaaagctcatgtttttacaatccatcctcactcattctggaggctaggaatagaactggatgagcaggaagctctctagctctccaccattttgggtttcttaatttgggttgaagtattgagaattttcagatttgacatttattcaatacctactctataccaagagctaccgagatggtagggatacagcagtcaactcttctgtacctagtggtcttctaactctctcttg

SEQ ID NO: 317 - DNA, 21441 bp, Homo sapiens
ggaaatagggtccaatagctgcgaggcgtgagttcatgtggttttcagtctcgcagtgtgtgatcatttgccgtagccaccttgggagactaacaaacctgcagttcctgaaggattcaccatccttctgttgaggaggagcatttgttggcttctgtctcacaagaaggatctgtctcttcataattccacgatttcgctcctaggtggtctgttccagagttctctgcatgcttagtgcgtgcattgaatgcctgcacgggatcctggagcacagtacctgcccactgaatatcagcttccatcttcggtactatgaggagaaaatacctgctctcttaggattgggtttaatatcaagttgagcatatggctctttgtttgtagaaggcttgtatattcgatgctaacgttgtcactgttctcttttgaaggctctctatgagaacatgctggtggagctgccctttgcaggcttctttctttccaagttgcttggaaccagtgccgacgtggacattcaccacctcgcctccctagaccctgaggtgtataagaatttgctctttctgaagagctacgaagacgatgtggaggagcttgggctgaacttcactgtggtgaacaatgacctgggagaggcgcaggtgaggggtcaggaggaggattcacatacctgtatagcaagtagcagcatctccttgtgtgtggaagtccatttgtgttacagcgtttgacttccgcacattttagttagaatgactgtggctgtgagttagacgtcgaagcatatagctccaaagcaccttagccctggcgtctgagctgagtgcagttcctgctcccacgcatgaagcctgttcctgcccggcagcccctcctgcggagctccactctcgaggctgcggcccaggcttgctgcttgtctggctcttcccggtgctgggggtggccgttcagcagcttcccggcaggaccccttgcttagtcctcactccttgcccgctcagagccacctcagctgctccagcactgtctagggggtgtgttcattacccatctggttacttttgttacttatatcctttttaaaaaagaaaaaagaaaggtctatattagagattcaaactgattttcttaataacagctttatcaacatgtaactcacataccataaaatctgccctttttagtacatgattgagtggtttttagtatattcgtagaggtgtgcagccatcatcaccctagccaatgttagcacattttcctcggtctacagagcaaccgtgcacccattagcaggctcccccacctcccgcaggcagccaccagtccactctgtctctgcatgggcctgctgtggacacttcacatcgatagagtcttttttttttttgagatggagtttcactcttgttgcccaggctggagtgcagtggcgcaatctcggctcaccacaacctccacctcccgggttcaagtgattctcctgccccagcttcccgagtagctgggattacaatgcgccaccacgcccagctaatttttgtatttttagtagagatggggtttctccatgttggtcaggctggtctcgaactcccgacctcaggtgatctgcctgccttggcctcctgaagtgctgggattacaggcgtgagccaccgtggccggcacgacagagccttttacgtggtcttccttcacttgtagttgcatggatcaggacttcattccttttctggccaaatgatattccattatatggatataccacaaggtctttactggttgatggacatttgggttgttcctatgtttgggctaataagaatattactgttataaacatccacatacagcatactaaaataattattaatgagttagtaacatctgggatttgcttcaaatacactctgtgcatccataatctgaaaatccaaaatgttccaaaatccaaaactttctgagtgccaacatgaagctcaaaggaaatgctgattggaccatttcaggtttttggattaaggactcttactgataagtataatgcaaatattccaaaatttggggggaaaaaatacaaatccaaacacttctggcccaagtatttcactcagataagggatactgaccctgtgtggtgagaacaggggcaggaagtggggctatcagttccagagactggccgggaggtgtgatgcctgatgaactggctgtgtggggttgggagctcatacactgttctgtctactttagcatatggggctttgttgttgttgttgtattgttttgagacggggtttcactctgtcacccaggctggaggagtctagtgatggcatctcggttcactgcaccctcagcctcctgagtagctgggattacaggcgtacaccaccaaacctggctaatttttgtgttttttgtagagatagtgttgccctgtgttacccaggttgatctcaaattcctgagctcaagcgatcctcctgcctcaacctcccaaagtgctgggattacaggcatgagccaccattcctggctaatttttgtgttttttatagacatgggtgtctccctatgttgtccaggctggtctcaaagtcctgggctcaagtgatcctcctgcctcagcctcccaaagtgctgggattacagatgcaagccaccatgcctgtccaagagccatatttatttggttacaacttatttagttgcttttgtttctgcatatttttccataccatagagctgaattttcaccaatgcaaaatttagataatttggcgggggggctgttactgtcattaggaagtactcgacatccagtgatgtcgcttgctgctaggtcttgcaccacctagtggcctgatttctaaatggcataaaagccttcggacggtgagtgttgtggtgacctgcctgaggcctttgctaatgcgagtatttcccatttttccttctgaaataaatgttaatagtgaaacgtcgcatatgcaagaattccattaaagcactgccgataatactggaatctgttaaaagcaaaagtgtgaagttaagatgttccagttattcatagagattcccactgagttaaaaaattatagataatgtatgagaataattatactaaagagcctaatgagaaaaattaagaaattcactagtgaagcacctaatttagagggagatcttaaggatttctgtagaaataaataggtagtcctccttacaagtttttaagtttataaagtatgatttaaagacttgtaatatgcaaatactttattgtgtcagcaggttatgttaattaatcatcccttttaaaatatggtgctgctctcaaatttgtttttttcagtgtaatcaatttggctgttaatctgtttaatagtgaccatgaaattttagacgactaatttacatagaactctttctagcagaaaatgctaagggtttaagaaggacccacaaataatcatctgttaggtagaaaagattggacttgagtcacgacaccttggttcaggtcctggtttggccgcttttctgtgaggcttaaggaagtcacaagaccccttcctcatctcagacgggtgtgagtgccggaggatgaaatgagctaatggaagtaggtcatgtatggtggtgtcttgtggggctttatggattccaagtgaaaatagactttctggaggagcagaaaggacagctcttggtatcttgctgtcctgagaactgctccagttaaatatatttgtatttagaggaaattttaaatatgtccctcagatctgaaatttagcacttatgtgacatgatttttaagtacacatagttgtttaggcttagcctgagagagaattttaaattaaaagtagtgtaaccgtttaaaagttattagaggggctgggcgcagtggctcacggctgtaatcccagcactttgggaggccaaggcaggcagatcatttgaggtcaggagttcagaccagcctggccaacatggtgaaaccctgtctctactaaaaatacaaaaaactgagccgggcgtggtgatgtgcacctgtaatcccagctactcgggaggctgaagcacaagaatctcttgaacccagatggtggaggttgcactgagccaagattgctccactgcactccagtgtgggtgacagagtgagaccttgtctcaaaaaaaaaaaaagttatagaaatgtcagttttctctgatcaggcaaggtaattgggagccttggaagttcctttaactgataacttcactggtcctttgtcttccaaatcatacaagtacatcatcatttattacctgcctctaatccatttaaaggaaggggtggtattttatacattgaaatataatagctagcctcctgaggcttggttaacagatggactgtcagctgagtacaagcaaaggaattaagataatgaacacaatctttaatcagaatgaagacaatggaattgaaagcccattcttaggcttgatggttccaaaccttaggaagtgaattattgagaataattgtatcatcctttaaaatgtgaaacgttaaaagaagcagatctggtaagttgaacgttcaagttcaatttgaacattctgtataaaatgagaaccagcaaacgagtctcctataaccatcagctgtaggatgacttaagtcaggctctctagcacatttgtgaaacaatctttctgtaaatggtaagagactgggacatcagtgccattgcccagaggcagcagtcttgtctgttactctgggaatattaaagctaccaggaaaactgaaggctgtgaaaagaaaagaatggaaaggtagggaagttgaaatgtctttgttcatttattttgggcttattttatattttcattgtccacagtataggttgccctcatctaaccccaggaatgcagttggggtgtttttgttgtttttttgttttgttttagaaatacaggtgggggtcttgctttatctcaaactcctgggcttaagggatcctcttgccttggcctcccacagtgctgggattagaggcgtgagccactatacccggcctgtttttttggttttcttaataaatactttttaaaaatttttttatttaaaatacactctttataaattatgattacatgtttatattgtattttgctcgtgtactgttttgtatttatgaattcatataatcatgtaatcacagcaattccaagtcagacaaacaaatatcaccattttattaatggccaaaagtttcaaggtgtaaagtgacttgtctgtcatacaagtgggggacagtaagacccaggtctgtgtttccgctgtgttgcttttctcatgagcactcttgtggtgtttatgggagctccacgttatacctgcaaattctgtgagtatagccacgtactaataaaaagtgttcttactcactctgtttatatacataagaaattggctgatctgttatcactgatcgttaccaccaccctttgtatcgtaattaaagtgctttatagtaatggcattgtggaagcacacaggtaagtgtgtgctgcttatatggatgaaaatgagaaatcactttactacagcctttgcgtttcctccagaatgagtcgctttttctcttctgacttaacggtgattgtttgcttcatgtctttgccctctgtgatttctcatttttgtttaagtaaaattgccatggtgacattgctgcacaattccctagtgcttcggaggaaacatggatggttagtgatcttaaagacagagtaaggtgctgggcttcggagactcttcctggaggtgcatcttggcatctgcacaatgctgtgcatactcgggtactatttcgtatttagattcttgttcacaaagcatcaagtcctatttccttaaaacatttgtttcttgcttttttttttaacctattatcatactttgaggattttgagatccttacgttttgtattcccaggtagttgaactaaaattcggtgggaaagacatccctgtcaccagcgccaaccggattgcgtacatccacttggtggcagactacaggctgaacaggcagatccgccagcactgcctggctttccgccagggccttgccaatgtcgtcagcctcgagtggctccgaatgtttgatcagcaagaaattcaggtaccctacctgctgactttctgggacacgcttgtcacaggaaatgaacaggctttcttaaaatttacctcaaatgttattatttgaacttttttccttaggtattaatttctggtgcacaagttcccataagcctagaggacctaaaatcctttacaaactattcaggtatgttatcactgctagttattgtttctgaaaatgttgcaggtggtcatatttccaaagtaatttttattttattttaattaatttatttattttttttttttcagactgagtttcactcttgtcgcccaggctggagtgcagtggcgcgatcccagctcactgaaacctttgcctcccgggttcaagcaattctcctgcctcagcctcccgaatagctgggattacaggcacctgccaccaggcccaactaatttttgtactttgagtagagacagggttttgccatgttggccaggctggtttcaaactcctgagctcaagtgatccacccccctcagcctccccaaagtgccaggattatgggcgtgagccaccatgcctggcctcaaagtaatttttattgtactcttttgtaggggtaatgtacatggttcaaaaaccagatggctgagtgcagtggctcacgcctgtaatcccagcctttgggaggccggggcaggtggatcacttgagctcaggagtttgaaaccagcctgggcaatgtggcgaaatcccatctctactaaaaattagctgggcgtggtggcatacacctgcagtcccagcgtggtggcgtacacctgcagtcccggcgtggtggcgtacacctgcagtcccggcgtggtggcgtacacctgcagtcccatctacgtcgggtgctgaggcaggagaatcactggaggtgggagacggaggtcgtgagatctcagtgagccgagatcatgccactgcactccagcctgggcgacaggagtgaaaccctgtctctaaatagataaatatatacatacacaacgtacatgggcaaaaaaaaccagatgtttaacatagaagatagataaatggccagtaagcaaataagcacacaataacgatgttcagcatcattagtcattatagaaaaatgccacttacatccaaatgagataaccccacatacccactagctgtctactggtgcaagtgagagctttttgaggaaatggaaatgttctaaaactggattgtgctgatggttgcaaaactctaaacttacaaaaaatcatttttacatataacctgtgtgtatccatgcgtatgtatctcttatctgtagtttgcattgtcctacatctgaagtctaatctttatgtaaaagcaaataatgcctaaggtcacgttgtccccatgatcgggtcataagtttaaggaaatgaaatcagtctgacctttcctttgccaagagattgtcttcggttgttttcattacccatctgcactgagggcttgcacctttaataatctcagctatgccagtaaataggtttaaaatattatattcattttggtgccaattaatgcacttaagacattttattggtgttatttctgtagtatattaacaatgagggaacaatatacagcaattattttaggtttagggagcactttactagattaaaagctgtaagtggcagacattacatttcagaatagtggtctcatcatatagtgagattggttgttagccatggtattaatatcagaatgataataagttagaaggaaagatgataaaattaatttagccaccaaatcatgctgggaaaacacccagctgtgttagtactagacacccattgtctgtcatgttagatctgtggccacgtgcaagccccttctctgccgtctgttcagcggcggctttgaactgcagcacggttcttcaaaataaggctcctctgcagtagttcttggtgcctgcattcatctttatagttacagggtgatccttattctagctttttatgtatttatttatttattttgagggcgaatctcaccctgtcacccaggctggagtgcagtgatgcaatctcagctcactgcagcctctgccttctgggttcaagcaattctcccacctcagcctcccaagaagctgagattatgggtgcgcgccacaacatccagcgaatttttgtacatttggtagagacagggtttcaccatgttggccaggctgctctcgaactcccgacctcaagtgatccgccagcccgggcctcccaaagtgctgggattacaggtgtgagccactgtgcctggccctgctttgaccctccttaagttgctctccccttctcgtactttgcccatcgcctccacataattggcggtgggtggggtgggggcggggggaggcagagaattccgcttttgcatttacaatcggtccttcatatctgtgggttctgtccacatccatggcttcaaccaattgcagattttaaatatttgaggaaaaagcaatggttgtgtctgcactgaatgtgtgctaagcaatatagtgtcacagccatttacacagcctcggcatgagatgggattgtaccagtgctctagagatcatggaagtgcacagcacgtacacaggtgatacacacatgccacgccgttttagagaagggacttgaggatccatggactttagtttccgtgggtgtctggaccaatccctgtgggtcctgaagggtgggtgtgctttgcatttcataaagcatgtgttcattttgccataggaggctattctgcagaccatcctgttattaaggtcttctggagagttgtggaagggttcactgatgaagaaaagcgcaaactgctgaagtttgtaacaagctgctctcgaccccctctcttggggtttaaggtacacaactttcatgacatttgctttaaagaccacttcataataagaaaggcagcagaacattcagtagggttaaatgaagtccttttacatacacttttgtttttatcttcagctagatttttaattaagtactggttatgatgtatatattttggtgctagttttatttggggttgctttttttgtttgttcacaataacctagtcatatgatagttacacattgtggttatgattgcctgtgaacaaaccgtacatttggagggactatttgcaatattaataatgtctcataaatctgtaacacatcttgggctttttgctactgaactgaagcaggtacaacgtagagatgttgatggagtgtatatgctactgagccttattttaccacttctggaaattaatgttgatcttacgtaatttggcttatttttagcaattaaaattgcctcaggcagatggatcatttgaagtcaggagttcgagaccagcctggtcaacatgatgaaaccctgtctttgctaaaaatacagaaaaatgagccaggcatggtgccctgtgcctgtaatcccagttacttgggaggctgaggcacgagaattgcttgaacccaggaggtggaggttgcagtgagccgagatcgcgccactgcactgcactccagcctgggtgacagagtgagaccctgtctccaaaaaaaaaaaaaaaaaaaaattgcctcaggaacgtctaatcataattcctgtattcactgtaaattaaaataaagccatattaacatttaaaaatgcacacagtggtatatatattatagaataatatataattagataagtactgtatgtgatttgtgcttatgaaacttcataggcattcactttcttttttccttttttctttttttttttttttaagtaagatgagcactcgctgtatcacccaggctggagtgcagtggtgtgatcacggctcactgcagccgcagccacccaggctgaagcaatctgcccacctcagcctcccaagtagctgtgactacaggcatgtaccaccatgcctggctgacattttgattttttgtagagaagggtttcactgtattccccaggctggcctccaactcctgggcccaagaaatcctctcacttcagcctcccaaggtgctgggatgacaggtgtgagccaccacaccatgcccagctggcattcaccttcaaataaccttcaatcagaaagagttcctgcacactcatgtagtcccagctactcttgaggctgaggtaggaggattagttgagcccaggagtttaagaccaacctgggcaatgtagtagcgagatcctgtctcaagggggaaaaagtaatgttaaggttttttgctttgttgttgttgttgctgttttgtttgtttctttgtttttgagacggagttttactctgtcgcccaggctggagtgcagagggcaatggcgtgatttccgctcactgcaacctctgcctcacagggtcaagcaattctcctgcctcagcctcctgaatagctgtgattacaggcgtgcgcctccatgcccggctaatttttgtatttttagtagagacggggtttcaccatgttggccaggctggtctcaaactcctgacctcaggtgatccacctacctcagcctcccaaagtgctgggattacaggtatgagccatcatgcccggccccccaagtatttttttatatttctgagtgaagctattctttaactttttacttcgaaactattttaaatgtatagaaaagttgtgagaattgaccaaataacttctaaacccgcactgaccaattgttaacattttgctacatttactttatcattcttttcatgcatttctttcctgaatcatttgagaataggttgaagacatgaggtcttccctaaatatctcagcacatacttcctaagaacagagacagttttgaaacggccacaattaaattattacaagtcaggaaattgaactctgacatacggcacttaccttatcgaatccactggctgcacagtgtggtcctgggaccagcagctgcagcatcacttgagcacatgttaaaaatgaacattttcaggccccactcagacctgagtcagcgctcagtgggagcggagccccgcagtcacgttgtgaccagctcttcaggtgttaggccggttgtcccttcgcgtccttcatagaatctgatccaggaccacacgttgcatttaattggcgtgctctttagtttcctttcttctgtacccccattttcaaggggtgcaggcaagttatcttgagaatgttcgtcaatgtgatgtcgcagccccaccgttgggagtgtacagatggcaacatattttcacacagtgtgtttatgaatgttcagagcaagccttcataatggccaaaaacgaaataattcacagtacatgaactgctagtaaatactatagattaagagatatttagaatttaaaaggaataaatgatatctactacactgtgtatgaacattgaaaacactgtgctaagtgaacgaagcaagacacaagactacgtattattatatgtaattccactcggataaactgtcctttgaaaggcacatttagagacacagagcgggtcaggggctgcacagggctggaggtggcagcgggagcttcggagaagtggagcgacccaaaaccggattgtgggggtcgctgcggaactctgtaaatttgctaaaatcattggattgtacatttaaagggataatcttatagtaagtcaagtacacctcaattaagctgttcttaaaaattgactataaactaacacagcatctcagttagtgccctcagaactggagttgggacccagtagagaggtggaaagaagtgaggcctaagtgcagtgagtttgtttcaaataggtcaatcatcgacgccgttatgttctggaagtaatgaataataaagacgtataaacttaaacgtgttagtgaataccatcactcaatgatatcagtagaaatgataatcttccaaattgttggagagaaaaaataaccatgcaaataaaacaggacaaacagaaccaactctgtttaccagatatggggggtgggggtgggaagtaacattcagaatcgtaaaatagaaaacatagaatgagagaagcctgaatgttacaacagtgagtgcggagaaactgacgtaatgaaagaaaaagactttgagacagggccaggaaaacgctgccgcctacaagcaacacacctaaacggagtgacccagaagggtttagtggcacgtccaggttcgtgtgtgaagaaatagatgggtccccttcagagtttgaagcatgacccatgtgaccagataggagaatctctcgagcgcagggaaagctgggtgctgcctgtgtggtggcagagtctggagggcttgctgtgctggggactaaagagcaggaggactgcaggtgaggcgtgcagacgactttttatcggtaaagattttaatgccatttggtaattttgtcattaacatttattatgatagacaaggcttctagtatctttgtttcaaaactggtttgttccaaagctagagataagaaaattatgcatctcatctagtttcataaaaggaagtttggaggacctgctcccatcaaaacactggaagatgcagagacttttgtcagctcctggctaattagataatgctaatcatgtgagtagcaataaaaattcgaagtcctgccagacgtaggttctagacattctgacagccaactaaagagccagcaataacgtgtgcctaggagtgcgagagccttctccacctccgtgatgcctccgggttcgtgcatggccacttgtgctgcgtgagcgtcgtaggtttaggggaacagaagtagagggatttacatgagcttttaaaatcccaaatagactggccaggtgcggtggctcacacctgtaatcccagcactttgggaggccaaggcgggtggatcccctgaggccaggagttcaagacgaacctgaccaacatgatgaaaccccgcctctactaaatacaaaaaaaaaatcagccgggcatggtggtgcatgcctgtagtcccagctacttgggaggctgaggcaggagaatggcttgaacccggaaggtggaggttgcagtgaaccaagattgcaccattgcactccagcctgggcaacaagagcaaaactctgtctgaaaaaaaaaaaaaaaaaaaaaaaaaaaaaaaaatcccaaatagactaaaagggaaaatcctaccccagtcaagaccccgcacaatcataattgagttataccgtggaaaacactttgagcatccatgagacggtcttactgttttttttatttttctcaatgttctaacatatgtgaaatttaattgatttttccatgataagtgtttttgaagttgttatatgttagacatccagtttggaaaaatcatcttaatatttaggctttccggttagcttagtatgcctggatttgccagggctgcagaattaatgtagacttaaaggaagagaatgtctttcagttgaagtactataaatagcaaaggcaggcaggcataattttaaagttatgaaactccttagtgccagattattggagaagaataacatctgctaaagctaattaaagtttaatatgtttaataaatgtgattgttacagacaaaaaatcattaaagtgctgtagaaaattgttaagttaccatcaggccacataataaattaatgatttttctcactctgaattaatgcaaattcccgttgtactgtatttaattatgcacaaaatggtgcccttgactcagatttcagtgaagaacttcatttttttacttttaagtctccaagtaggaaattcaattagcgttatgaaagaaacactaaaatgtggcatttaattgcaaaatatattttaagcttttcatttatccagtgactttgccagcagtcactgaccccttcattcagagatccttttctgtttcaaaaatgcaatgcttcctttttagtatattcaagcatttgtgaaaattattgccctcatgtactcagaatgctgaataataagtgtaataaatgttatttctggttctcctttggttctcattctaacatttttatgagagatttaaaggagcaaataaactataattagaaaaaaaaagacaatggattttagcacatattatatgccacatatatattttttaatgaagtttacatttaacagtaaagagacctacaaagatcagtaataagaatcatgtaagtctcttcataggctttttttttttttttttttttttttttgagatagagtttcgctcctgttgcccaggctggagtacaatggcccatctcagctcgctgcaacctctgcctcctgggttcaagtgattctcctgccgcagcctcccgagtaggtgggattacaggcacctaccaccacccccagctaatttttttgcatttttagtagaggcaggatttcaccatgttggccaggctggtctcgaactcctgacctccggtgatccacccacctcagcctcccaaagtgctgggattacaggcatgagccaccgcgcccatcctcttcatagcattttgtgggctgtgctcttactagttttacccttaacataaattatatgctaaactcaacatataattgaaacaaaatccaactgaaatgtgggtgtggccagttgggtgcctgttgtgctttgtgacagcttcagtgcttccaaaggttcctgcagaatgggacattgctctagtttgattcacatttgactacaatggttagaaggtaattaccttttctattttttaaatttttttgaacataaactcaagattgtattgtcttcataataaaacaaaagatgacacttagaattggatgtcttggcccttcctcctcttctgtcctcccagttcagaatgctcacatctctttatatccagcatcctcttacatctgcacctatgctcaacgcactcaagcctcagcacaagcttcttcgtagttctagccttttcccggaaaatcagcttagtctgcccaccgtagccgctatgcttcgtgtcctaacaccaccttccccgggcacctgtcctaacgccaccttcccaggcacctgtcgtaacgccaccttccccgggcgcctgtcctaacgccaccttcccgggcatacagagaatccgtgcccttttgtgccgtgtcgctttgtgggcttgccacacttacagaaagtcgaacgggggccgggtgtggtggctcacgcactttgggaggctgaggcgggcggatcacctgagttcaggagttctcgaccagcctggccaacatggcgaaaccccatctctactaaaaatacaaaaattagctaggtgtgatgatgggcacatatagtcccagctactcgggaggttgaggcaagagaattgcttgaacctgggaggcagaggttgcagtgagccgagattgtgccattgtacaccagccttgttgagagagcaagacgccaactcaaaaaaaaaaaaaaaagtctagcaagtattaggaacattcactttgtgggagcgctgttggcaccgaaagcactttttttatattggattttttttttttttttttacctttcagtaaaagtaatgttttcattatagaaaattggaaattgtgatcaagtataagaaacctatatttcctcccattctaaccattatttttttatgtttccttcctttaattagtatgtgttttatctacctacatgagtgtgtgttaatgtagatatgcataattttttctgtttttggtagaggtagggtcttgctctgttgcccaggctgtcagaaactcctggccttgagtgatctcccacaccagcctcccaaagcactggtactacaggtgtgagccaacatgctcggcctgttacacacacacacacctggtattacaggtgtgagccaacatgctcagcctgttacgtgcacacacacacacctggtattacaggtgtgagccaacatgttcggcctgttaagcacagagacacacacctggtattacaggggtgcgccaacatgctcggcctgttacacacacacacacacacacctggtactacaggtgtaagccaacatgcttggcctgttacacacacacacacacacacacctggtattacaggtgtgagccaacatgctcggcctgttacacacacacacctggtactacaggtgtgagtcaacatgctcggcctgttacacacacacacacacacctggtactacaggtgtgagccaacatgctcggcctgttacacacacacacacacctggtactacaggtgtgcgccaacatgctcggcctgttacacacacacacacacacctggtattacaggtgtgagccaacatgctcagcctgttacacacacacaaacatatatatttttaagacagagtttcactcttattgcccaggctggagtgcaatgcgtgatctcgtctcactgcagcctgcaacctctgcctcctgcctcagcctcccgagtaattggaattattacaggcatgcaccactacagccggctaattttttatttttagtagagatggggtttcgccatgttggtcaggctggtctcagaaatcctgacctcaggtgatccacccgttgtggcctcccaaaatgctgggattacagtcatgagccactgctcctggtcacgtaatttttaaatataattttagctgtatcttgtgttcagttttctaggctacctttttcactcaacattacatcaggatcatttttcctcatgttattctttgagatatttttaatgggcttgtagtgtcccatcatgtgatttaccagtttactttctgttttttagttgtttacagctcttccttcgttgtgatgctgtgaacctcttgtgcataaattatcatgtgcatctctaattatttcttagagtacagtcccaggagttgtgaatgtgggtgaagcccctgctcctgctgccaggcccacctctcagagagtttcgtgtacacgtgtgcagggaagggctgacctagctaggtctctgaaacccgtgccagatactaaatctgcacaggctgcgacagtgagcagactgagggcgatctgtgccttattgtcttcctgttggaagagaacacataaatcacgtatctcaaatgtgaggcaaatagctaatggtgtttgtgtatacgaggaaggtggagtcaccggttcttcgtggccatcagaggaccgacacgcccataggtctcatgcattaagtctgcgttgagcaatccctaacacggtttttgcctacagatacatttgcacaactgtgaaaaccaggtacgtattcattgcatcattttttgtaaaaagctgagagaagtgcccagcaacacgtcgtgccgcgcgtgtgcatggaacaccatatagcctcaccattaataggcaagatgagcgagacccattatcagatgagaaaagcacggcacggaatactgtgtccaatgtgctcaccgtctcaattttaaacctaaaggagggagaacattttctcatgcgtgcatttcatctctgggagcacttaagacgctgaagcgttggttgccagtgggaatgggaactgggtatctgtgatacagggatgagaattttcacactgtacctttaaataccagaacgtcatgaacacatctgaaaaacaatattcaaatttccctgatcatctttcttttttgttaacaattatttaaattctggcacaagcaagccacttttcatcatgcatttggtctatagatgttctacctccctcaatttcgtcttgtaatttaatgaataggggaactggggccgggcacggtggctcacgcctgtaatcccagcactttgggaggctgaggcgggtggatcacgaggtcaggagatcgagatcatcctggctaacatggtgaaaccccgtctctactaaaaatacaaaaaattagccgggcgtggtggcgggagcctgtagtccaagctatgcgggaggctgaggcaggagaatggcgtgaacccgggaggcggatgttgcagtaagccgagattgcaccactgcactccagcctgggtgacagagcaagactccgtctcaaaaaaataaataaataaaaataatagggtaactgggttgcttctttgtatctcttgaaaactgatagaggtctcatcagattctaaatttgaatttttctttttttggcaataacatcacataggtaatgtcgtatgcttcccattcccttaatcatcgtggagatccacttctcgtgagtcatctccccacaatgctgggatcgatctctgcgtcagaattcctcttgattttagtggtcacttatcactgcctagatccattgtttaatgtgcttctaaaacagccgtgttctaattacataattgtataatttattagctggaattttctatttaaaaacagctttgtttcttctcaccaatgatttggttaacccgagtaatagcttgtacaggaaagatagaataaatcttgatcctttttaaaaaatttttatagacagggtctcactgtgtgttgcccaggctggagtgcagtggtgtgatcatacctcactaacctcgacctcctgggctcaagacatcttttcacctcagcctcccaagtagctgggagtataggggcagaccaccacacctggctaattgttttgatttttatttttagtggaaatgaggtctcgttatgttgcccaggctggtctcgaactcctaagctcaagccatcccccagctaggcctcccaaagtgctgggactacaggtgtgagctatgcgcctggcctggaatgttatttatccctttttatgcctgaagcacagtgcataatcttttatgtaagttagaactaagccatcaatgtaattttttaaaaaagcaaatgtgggccaggcacggtggctcacgcctgtaatcccagcactttgggaggcagaggtgggcagatcacaaagtcaggagttcaagaccatcctggccaacgtggtgaaaccccttatctaggaaaaatccaaaaattagccaggcatggtggcaggcacctgtaatcccagctacttgggagactgaggcaggagaatcgcttgaacctgggaggcagaggttgcagtgagctgagatggcgccattgccctccagcctgggcgacagagctagactccatctcaaagaaaacaaacaacaacaacaaagcaaatgtggtttcgggaaaatgtgactgcaatggtaactttactgattggagcaggcacattttgtgtactttgtattaaaactcatgtaatgccatgcttgttacagtgacatcttgcacacatgctgtttttcaggagttgtatcccgcattttgtattcacaacggaggctccgaccttgagcggctccccacagccagcacctgcatgaacctgctgaagctccccgagttctatgacgagacacttttgcgaagtaaacttctctatgcgattgaatgtgccgctggctttgagctgagctgaagctgatgctggggtcagacccctacagagaaccagtgcttccttcgtcagcagcgcctccccagacccacgaggatactcacactgcacgcctgaggctctcctaagctccttctttcattctgccattcctccctcccttccttttttaaatgatttttattacggtgtggtcacttatttagatggacattgcttttcaaataacttaaaataacacgttatgtgccatgtggctactttagtaatattgccaagaagagcacagtttttacactagtggcatctcagtgaaattaaccaaagatgaagctttggctttgctggtgagatcagagccctcctgagcaggcagcgccactccagggttcagacagggctgcacaggcggcagagatacagggtctgagggctgagacgccatggggccgctgctgcttatgtggttggattgtttacaagcctcattattaaaactgaaggcattttttttttctgctgcctttcccaaagtggttaggtttggaaaagagatgatgatggtaatattttatttgtgctttttaagccatttccccaaatgggactagcatgcttgttttcagtataccgtggcctgcctcatgatggtttggagatactgtctgtggatgtgaggtggggacttcattcattgtcctatttctatctccactttgtgcctggagagctttcaggggaggtggaggaggagggtctgccaagctactgcaacatctgtcacccactatacccagttacttgggggaggacagacactgtggtgtcattaaagttgtttgaaccaaagtggcggctgcatctttgtcccgatgctagccgtgccggtctcccatcatccgctcgccctcctttcccctgggctgcgcccacttgtcttcctggatatttgggggtgactcgccatgcttggcaccctctgcttcctggtgctgctctgactcgaagacgggacagtccctggtgcacatccagggaagaggagtgtcggtagttcttgcagtaggcactttatcaggacctgacctgttgctgggtgattttagtctctacaaacagaaagcgtttcaaagcgtcagctgtgggagcagagtgaccctttgctgatgctggggggaggggatctaaatcctcatttatctcttctatgtctcgtattttactgtcactggaggctctgtgggctgtcatagttaattgaccataattagcaatatacttttaaagtgggaaagctgaatgacacttttaagacaatgaacattatcaaaacaaaatgtataatttcttaatttgaataataaattaagcgtttaaatgctatttgtagtcttgatatacagaaataaaataattagggttggtcttttttattttaggttgttttatgttgaatgttctatatcttattagttaatttgtatattttattagtattttggaaatagcatatctgagactgaagagaaattgacaattcacttatttgtggtttttttctcagctattctgagcttatttatttatttgtatgttctaatggctaaacatttacattaaatgttttttttcccaagatt

SEQ ID NO: 318 - DNA, 2508 bp, Homo sapiens
aatatggttaaaatttgacaagataatcctgaagtttgtaatgacaagtctggagacaatataaatgcctttcagtggggaggatgattttaagtttatttatatgtttactattgaatatgtgcagtctgaaatgaatggtgcatctccatttgtttttcaagatagattaaaaatccaaggacagaagaacattgtgaataataagctcccatttgttggcgatagtaggtggagtgatagaagaggctgtgggtacataaacaggtgatactagtcaagagcaggtcaaatggaaagaatgaagacatgtttggaggctactggaataattccaagtaaaagttgctaaaggacatgtactaggataatgacataatgctttgtaaaaaacaaatctgaaaaaattataggtgaatgtaatgtacacaaagctatctgaacattgcagattatgggaagagaggagtcaaagatgatgattccaggtttcaaatctggtgacaatatgtggttcatttctcatctgccctcccctcctatgtgtactttgctgttccttctcttataagtggggtaatgctaaagttttcttcatcccttgctttccccactctctttcttccacattctctttcttcttcgtggtttcagctgtcatctctttttggatgactcccacatttttacctctggttctgatctctttctcagcctctggtccttcatatcccttgcttgcttgggatgttatcatgttacgatcatggtcttagtgtaatcagacatctgttcaattccagccactgttgggagatatatgtcaccttggaaaagttccttaacttctataagggtcaatgaccccatttataaatgggcatatgaatactacttatctttcaagggtgttaagagcactgaatgaataatgatcttctaaaaacagtacataaactgggctcattctccttggtatgaggtgaaatgaaagaaatttagataatattatatctattcacctatcttctgtctttcttgtttttggcatataatctattatgaaccatcatttattggaaaggactgtctgaagtatagctcagaaggacacatcagaaggtgtggggctcgtccttatggatggagaagtggggctatattggtgtggggaatgaaaggatgagccaggacaaaatgtagaaatagattaaatatgagagtcaaggaagcattaaattatgacttagctgatgtatagaataatatgttaccctttagagatacaggattttttgtagaagtttttgcagaaaagtgaaggaattgatatttattacgttgactgtaccttgtgtggtgcatttgttgcaactgatgaaacgatactgatacatttttatattaatactaaaatacatagtttgcattagggttcatactttgtggtgtacattctgcgggttttgacgaaggtatggtggcatatattcattgttactgtatcatgtagaatagttttagtgccctaaaaatcccctttgcgtcacctctttcattttcccctctccctgaacaccaggcaatcactaatctttttctgtgtccacatttttgccttttccagaatgtcatgtagttagaatcatctagtgtgcggtcttttcagagtggcttctttcacttagtaatatccttttaagattcctcaagtctttccatggcttgatagctaatttctttttattactgaatgatattcctttgtatgacgtaccacaattcatttatccattctcctgctgaaggtcagattgcttctaagttttcatagttatgaaaacttgtattttaagattaaaatctggaagtttttattgatattaggcattcgtttcttagggctgctataataacagagtaccacaaactgggtagcttaaaacaacagaaatttattctttcatagttctggagcctagacatcagaaatcaaggtattagcagggttggcacctgccaaccaagagagctttgagggagaatctattccatacctttctcctagctgctcatgagggttagccatctttgatgttccttggattgtaaatgcatcagtccaatctctgcttccctcttcatggggcattctccctgtttcttcacattgctgtcttcttgtgaggataccagtcatattgaattaggggcccaccctacaccagtatgacctcatcttaactaattatatctgcaacaaccctatttccaaattaggtcacattctaaggcactggtggttagacttcaacaacgttattagagggcacagttcaacccatagcatgaagtgatgctttctagaccattcttctttagatagtcatcctttttgttattgttgaatcatggatggtgatgtaacgttttccagctttggctagttgtggtttcagctgaaaaaccaaaatgtccctgactgtgttatataaaaaaaaaaaaaaa

SEQ ID NO: 319 - DNA, 1082 bp, Homo sapiens
tcatgttatgatcatggtcttagtgtaatcagacatctgttcaattccagccactgtgggagatatatgtcaccttggaaaagttccttaacttctataagggtcaatgaccccatttataaatgggcatatgaatactacttatctttcaagggtgttaagagcactgaatgaataatgatcttctaaaaacagtacataaactgggctcattctccttggtatgaggtgaaatgaaagaaatttagataatattatatctattcacctatcttctgtctttcttgtttttggcatataatctattatgaaccatcatttattggaaaggactgtctgaagtatagctcagaaggacacatcagaaggtgtggggctcgtccttatggatggagaagtggggctatattggtgtggggaatgaaaggatgagacaggacaaaatgtagaaatagattaaatatgagagtcaaggaagcattaaattatgacttagctgatgtatagaataatatgttaccctttagagatacaggattttttgtagaagtttttgcagaaaagtgaaggaattgatatttattacgttgactgtaccttgtgtggtgcatttgttgcaactgatgaaacgatactgatacatttttatattaatactaaaatacatagtttgcattagggttcatactttgtggtgtacattctgcgggttttgacgaaggtatggtggcatatattcattgttactgtatcatgtagaatagttttagtgccctaaaaatcccctttgcgtcacctctttcattttcccctctccctgaacaccaggcaatcactaatctttttctgtgtccacatttttgccttttccagaatgtcatgtagttagaatcatctagtgtgcggtcttttcagagtggcttctttcacttagtaatatccttttaagattcctcaagtctttccatggcttgatagctaatttctttttattactgaatgatattcctttgtatgacgtaccacaattcatttatccattctcctgctgaaggtcagattgcttctaagttttcatagtt

SEQ ID NO: 320 - DNA, 2508 bp, Homo sapiens
aatatggttaaaatttgacaagataatcctgaagtttgtaatgacaagtctggagacaatataaatgcctttcagtggggaggatgattttaagtttatttatatgtttactattgaatatgtgcagtctgaaatgaatggtgcatctccatttgtttttcaagatagattaaaaatccaaggacagaagaacattgtgaataataagctcccatttgttggcgatagtaggtggagtgatagaagaggctgtgggtacataaacaggtgatactagtcaagagcaggtcaaatggaaagaatgaagacatgtttggaggctactggaataattccaagtaaaagttgctaaaggacatgtactaggataatgacataatgctttgtaaaaaacaaatctgaaaaaattataggtgaatgtaatgtacacaaagctatctgaacattgcagattatgggaagagaggagtcaaagatgatgattccaggtttcaaatctggtgacaatatgtggttcatttctcatctgccctcccctcctatgtgtactttgctgttccttctcttataagtggggtaatgctaaagttttcttcatcccttgctttccccactctctttcttccacattctctttcttcttcgtggtttcagctgtcatctctttttggatgactcccacatttttacctctggttctgatctctttctcagcctctggtccttcatatcccttgcttgcttgggatgttatcatgttatgatcatggtcttagtgtaatcagacatctgttcaattccagccactgttgggagatatatgtcaccttggaaaagttccttaacttctataagggtcaatgaccccatttataaatgggcatatgaatactacttatctttcaagggtgttaagagcactgaatgaataatgatcttctaaaaacagtacataaactgggctcattctccttggtatgaggtgaaatgaaagaaatttagataatattatatctattcacctatcttctgtctttcttgtttttggcatataatctattatgaaccatcatttattggaaaggactgtctgaagtatagctcagaaggacacatcagaaggtgtggggctcgtccttatggatggagaagtggggctatattggtgtggggaatgaaaggatgagacaggacaaaatgtagaaatagattaaatatgagagtcaaggaagcattaaattatgacttagctgatatatagaataatatgttaccctttagagatacaggattttttgtagaagtttttgcagaaaagtgaaggaattgatatttattacgttgactgtaccttgtgtggtgcatttgttgcaactgatgaaacgatactgatacatttttatattaatactaaaatacatagtttgcattagggttcatactttgtggtgtacattctgcgggttttgacgaaggtatggtggcatatattcattgttactgtatcatgtagaatagttttagtgccctaaaaatcccctttgcgtcacctctttcattttcccctctccctgaacaccaggcaatcactaatctttttctgtgtccacatttttgccttttccagaatgtcatgtagttagaatcatctagtgtgcggtcttttcagagtggcttctttcacttagtaatatccttttaagattcctcaagtctttccatggcttgatagctaatttctttttattactgaatgatattcctttgtatgacgtaccacaattcatttatccattctcctgctgaaggtcagattgcttctaagttttcatagttatgaaaacttgtattttaagattaaaatctggaagtttttattgatattaggcattcgtttcttagggctgctataataacagagtaccacaaactgggtagcttaaaacaacagaaatttattctttcatagttctggagcctagacatcagaaatcaaggtgttagcagggttggcacctgccaaccaagagagctttgagggagaatctattccatacctttctcctagctgctcatgagggttagccatctttgatgttccttggattgtaaatgcatcagtccaatctctgcttccctcttcatggggcattctccctgtttcttcacattgctgtcttcttgtgaggataccagtcatattgaattaggggcccaccctacaccagtatgacctcatcttaactaattatatctgcaacaaccctatttccaaattaggtcacattctaaggcactggtggttagacttcaacaacgttattagagggcacagttcaacccatagcatgaagtgatgctttctagaccattcttctttagatagtcatcctttttgttattgttgaatcatggatggtgatgtaacgttttccagctttggctagttgtggtttcagctgaaaaaccaaaatgtccctgactgtgttatataaaaaaaaaaaaaaa

SEQ ID NO: 321 - DNA, 364 bp, Homo sapiens
attaaaaacagaagaaatccgaaaaaaaaactgagatctacaatctcacaaagaaataaaagaatatgaaattgctactattcaacgattagttttaccttaaaaacggcagctttatatggctaatcttaatgaattaaaacaactttgagatattatttttatcctttcatactggcaaagattaaaaaggtttgttaacatcttgaatcagcaaaactctggagaaacaggcacattaagggcagaagacaaacttgtaccatccctatgaaaggtgattttggcaattaactgttaaatgacaaatctaaataccctttggcctagctattccactgctagaagtttattctacagatat

SEQ ID NO: 322 - DNA, 105 bp, Homo sapiens
aggctgagacacgagaattacttgaactcaggaggtggaggttgcagtgagccaagatggcaccactgcactccagcctggacaacagagcaagactctgtctca

SEQ ID NO: 323 - DNA, 210 bp, Homo sapiens
atgtgaaaaagcagtgagtcctgtggaacattgggatatgtgacatagggaggactggaggggacttggcctctgggggcctctgtttctccaatgagagacaatttgagctgttatctgaacagtcagtcaatactaatcaacttttttaaatgcacacatcttttaacccaacagttctacttttaggagcttattcaacagttacac

SEQ ID NO: 324 - DNA, 308 bp, Homo sapiens
tggaagcaggaaaacttgcctttcttgtgggaagcaagtaaaactccaaaaaaaaaaaaaataaataagagggagttgtacagcaaaataaactttagatctcaaccaaactttgggagagcagggattctctggaaggagtgctcccaggcctcagcaaactattcataaagttagcttatgctgataccaaacaccagtaaaagatttgtcaaagttcaagtgttcctccatgcagagtccctctgtggttaccaaaatgttaaccccagtaatttgagacaagtcttagttaatttagaaaattt

SEQ ID NO: 325 - DNA, 247 bp, Homo sapiens
tgagagtacaggaggatgtttattttaaggtgtgcaccggctgagtggattcaaatccaaaaagctgagcattaaacaaagacagagcagggtttttataagtggacttacaaagtaaaacaaagcagttaatcatatagtgcataacttgtggccttgcatagctggtggccttggagctgtgtcaaaagaaaatcaagaactggctaaatacagacatttgtaaaacataatcatgcttaagaag

SEQ ID NO: 326 - DNA, 374 bp, Homo sapiens
ctaatataaatcctaagaactcagacacagtcgattgagaacagagcaattcccttttccctcgttttaaagaatcatgtacataaaaggtttgaacactttgaactttgaataagtttgaacacttcatgccttttggccactagcatgctgttattttatgtcgcaagacgagcaacaatgaggcatccacagctcccaggcgtcaagactgaaggacactctgcctctcccttagggtttgagatctctgagtcagggaacactgagtgaaagcaaagctgaaatattactggggatcttcagtcttggggaaaagagttataggtgttggattaacatcgagtgaaagcaagctgaaatattactgggga

SEQ ID NO: 327 - DNA, 352 bp, Homo sapiens
catgtacctgtgacaatatagtttcttgaccacatttatttatcgtgagttattatgtagtgacagatattaacttaaggaatgacatgcttaatatgtttgccacaattccatacattgatgaggatgctgcttttctgactaaggagaatttttgttcatctaagaacatctcccctggagagtgagagcccaagtcggctctgccttaaattcatgatctgattttatgagggtcacccagaacccactgtgcccttaacactgaagcctaggagaagcctgggctccttcaaggggaagaaagatgggcctgaccatcctatggtgggtgataacaataaagtgctca

SEQ ID NO: 328 - DNA, 518 bp, Homo sapiens
aacatatgttgggaatttggatggggaaggatgtagaacagattgctttgagacagaaaataatgcaaaaagatgaagggaagtgaatacacagtaaaaatatgttagacaccaaagattagcttcacttacactgcagtttttgtgggcactttgacacttagaactcacctggctgttgctgtacagcaagagaccatgtgaactgaagcattggttagacctatacatttctacaaaccgctctagccctagttgaacttgggaaaataaatatctgtatgaaaaagttgtctagatctgttacacaattactatcttgtttaattgtagaatgcatgaaattggttgtaaaatggcctggttaagagtctcatgtcagggccaggcatagtggctcatgcctgtcatcccagcactttgagaggctgagatgggaggatgagatgggagaggctgagatgggaggccaggagttcaagaccagcccaggcaacaaggcaagaccccagctctac

SEQ ID NO: 329 - DNA, 396 bp, Homo sapiens
aaattatcagaaagaatctatggaggttgaaaaatgtaactaatagtgtctcattctctattagtaatgtgttattctcatttatactgttgaaaaccgtttacagaaatatttaatatgattctctgcctagagaatgagaagcttgcatctttagatcaaagatgaagcaaacaagagtttcctattgtgtgcagttttagaatttcttgcctcatggcttcatggcaggttgcagtttttcaatccttgtttgcaaaatcttgaacccatcatagtgtacttggaaataatatgcatacatcgtaattttcctgtatataattagaatttttactggggtagaacttttcaagtacctcctttgagaatttccaggaatgattattaaccttt

SEQ ID NO: 330 - DNA, 667 bp, Homo sapiens
cagaatccacagaaaggaaccacaggactggccacagcagtacagggaggcaatggaagatgaggccaatagagctgatgttgggcacaggcaaatctttgttcacaacttcaggtagaggaatgcatggcagtcagaggggccttgcaaggaggggcctttgagcctcagttctcatgtattggggggtgggggtgggtacatattgtatttggtatttgtgttccagttatatttatgtcttttcatatttagttctggtgtggtgtctggaaatgtttcaactgttttaatatattgtctgattgggtaaatgtgattgaccacttgctgtctctgttgtattttggtatgagttttgatagctctataaaatgttttggaaatctttccatcttgttgcattatctagaaaagaatatagcatatagctatagatataggcttttccttgaaagcttgaaaaaaattcgccagtaaaataatctagcttaaagtgataaactaacaaacaaatataacaacaactgaaaaggcactctaaattgtggctggcttccctttctgtctgctattgtatgaagaatactgatgtttacctgtatttgctttgctgtactaaaatgtaatgaaaaataaaagattaataaatgaaacataatgctaa

SEQ ID NO: 331 - DNA, 139 bp, Homo sapiens
ttttttttttttgagacagagtctcgctctgttgcccaggctagagtgcagtggcatgatctcagctcactgcaacctctgcctcctgggttcaagaaattctcctgcctcagcctccagagtagctgggactacaggc

SEQ ID NO: 332 - DNA, 1322 bp, Homo sapiens
gaggtcctgagagactgtgagagccccaactccattagtattatgggcctcaatacttcccgggttgcaattaccctgaagccccaagaccctatggaacagaacgtagctgagctgttgcagttcctgctggtgaaggatcagagcaagtaccctatccgggagtctgaaatgcgggaatatattgttaaagaatatcgcaaccagtttcctgagatactcaggcgagcagcagcccacctggagtgcatttttaggtttgaattgagagaacttgaccctgaggcacacacctacattctgttaaacaaactgggacctgtgccctttgaagggttagaagagagcccaaatgggccaaagatgggcctcctgatgatgattctaggccaaatattcctgaatggcaaccaagccaaggaggctgagatttgggaaatgctctggaggatgggggtgcagcgggaaaggaggctttccatttttgggaacccaaagagacttctgtctgtggagtttgtatggcagcgttacttagactacaggccagtaactgactgtaaaccagtggagtatgagtttttctggggcccaagatcccacctagaaaccaccaagatgaaaattctgaagttcatggcgaaaatatataacaaagatcctatggattggccagagaaatacaacgaagctctggaagaagatgctgccagagcctttgctgagggttggcaggctctccctcactttaggaggcccttttttgaggaagctgctgcagaggtaccatcccctgattcagaggtttccagctattcctcaaaatatgccccacattcatggcctgagtcaagattggagagcaaggcaaggaagctggtgcagttatttctgcttatggattcaactaagctgcctataccaaagaaaggaattctgtactacattggccgagagtgcagcaaagtgttccctgacctcctgaatcgtgctgcccgcaccctgaaccatgtctatgggacagaactagtggtacttgatcccaggaatcactcctatactctgtacaaccgaagggagatggaagaaactgaggagatcgtagacagtccaaacaggcctggcaacaactttttgatgcaggtcctaagcttcatctttattatgggcaaccatgccagggagtctgcagtctgggcctttctgcggggcttaggggttcaagctgggagaaagcatgtgattacctgcagatacttgagtcagcgctatatagacagtttacgggttcctgacagtgatccagtgcaatatgagtttgt

SEQ ID NO: 333 - DNA, 1405 bp, Homo sapiens
aaccaattgtattataaccccctcccaaacacttagtgcatcctcccactcatgtaatttgtttaccttgttttctatttatttcttttgagatggggtctctgtcagccaggctggagtgctgttgcatgatctcaggtcactgcaacctctgcttcttgggctcaagtgatcctcttgcctcagcctcctgagtagctgggaccataggcacacaccatcatgcccagctaattttttgcatttttgttagaaacggtttcaccaggtttcccaggcttgtcttgaactcctgagtcaagtgatccgtgtgcctcagcttcccaaagtgctgggattacagatgtaagccaccgtgcttggccttaccttattttctaagaactgatgaccataagtaagttttggcacacaccactttgtatgcttcgtctctcatcccacatgtccgtggagataaacctcattgacatggaacctcagaggcagcttgcagaaggaataatacatcacaacaagatggcaacactctttaagagctgcatttccagtcctctggctttgtttcagtggggctgcttttaggttgattgaataactagcagcaacgatagcacctaaattattagttaatgaaagtctgtaatttgctaggcatgtgctaaccagtttacataaatcatctgaaagcctcacaataactttgaaaggctaggttttccctttcacagatgaagaagttgaatatttgatttatttattcattaaggaagagatttttaaataaaaataatttttttgtagagatggggattccctatgttccccagactggtctcgaactcctgggctcaagctatcctcctgcctcagccgccaaaaatgctgagattacaggtgtgagccaccatgcccaactaaggaacaaattttaatgggtgcttcttatgtgaaaaacatgggattagacactggggatagaaaaccgaatgacacatagtccttgctgttaggaaatatatggtctgttgggaaatctggcagatccacagacaattacaatcctgaggtaaaccttgggaagggttagaaaatacagaagatgggctgggtgcagtggctcacacctgtaatcctagcactttgagaggccaaggcaggcatattgcctgagctcaggagttcaaaaccagcctaggcaacacggtgaaaccctgtctctactaaaatacaaaaaattagccaggcgtggcagtgtgcacctgtagtcccagctactcaggaggctgaggcaggagaatcgcttgaaccctgaaggtggaggttgcagtgagccaagataacgccactgcattccagcctggatggcagagcaagactccatctccaaaaaaaaaaaaaaaaa

SEQ ID NO: 334 - DNA, 2131 bp, Homo sapiens
atgaattgtaaattatgtgcatgttatttaggcatgttttatgttttataggcatcaaatgggtacttttcatcttatttaaaataagtaaaatgaaaagtaattgttctccagcaaaatatataaattacatttctctctgagttcctgattcaagatctctgtagaagaagaataacaaagaacacctaggaatgatacaaatgatactttcaattttggcacttgtctgccctactgccatgtcctcatgagagtatccctgaactcagttctcgttggtcatttgacgtttgctgggagcgtactatgggcgaggtcttatgctgagggtgagcctagtggtgtctcacttcttgtagcttgggtcaggaaatggagatcagctactgtatcccagaaccttcttgccttcccagtcccaaggcaggtgctgtgggaagagtgtgtataaggtctgatggggacagacctggggtgaatctcagtggcacttctcaacagctatagatccctaagtaagttatctaatcatcatccccacagtgttctcagatgaaaatggggggtaataccccatctcataggagtttaaaaggattaaatagggaatgtagctatcatcttgtgcctggaattctgcaaagcatatgaaggtgcccttggaacttccttcccatttttcatatttgctctgccacctctacacccagccccgctttctgcaaccaattgtattataaccccctcccaaacacttagtgcatcctcccactcatgtaatttgtttaccttgttttctatttatttcttttgagatggggtctctgtcagccaggctggagtgctgttgcatgatctcaggtcactgcaacctctgcttcttgggctcaagtgatcctcttgcctcagcctcctgagtagctgggaccataggcacacaccatcatgcccagctaattttttgcatttttgttagaaacggtttcaccaggtttcccaggcttgtcttgaactcctgagtcaagtgattcgtgtgcctcagcttcccaaagtgctgggattacagatgtaagccaccgtgcttggccttaccttattttctaagaactgatgaccataagtaagttttggcacacaccactttgtatgcttcgtctctcatcccacatgtccgtggagataaacctcattgacatggaacctcagaggcagcttgcagaaggaataatacatcacaacaagatggcaacactctttaagagctgcatttccagtcctctggctttgtttcagtggggctgcttttaggttgattgaataactagcagcaacgatagcacctaaattattagttaatgaaagtctgtaatttgctaggcatgtgctaaccagtttacataaatcatctgaaagcctcacaataactttgaaaggctaggttttccctttcacagatgaagaagttgaatatttgatttatttattcattaaggaagagatttttaaataaaaataatttttttgtagagatggggattccctatgttccccagactggtctcgaactcctgggctcaagctatcctcctgcctcagccgccaaaaatgctgagattacaggtgtgagccaccatgcccaactaaggaacaaattttaatgggtgcttcttatgtgaaaaacatgggattagacactggggatagaaaaccgaatgacacatagtccttgctgttaggaaatatatggtctgttgggaaatctggcagatccacagacaattacaatcctgaggtaaaccttgggaagggttagaaaatacagaagatgggctgggtgcagtggctcacacctgtaatcctagcactttgagaggccaaggcaggcatattgcctgagctcaggagttcaaaaccagcctaggcaacacggtgaaaccctgtctctactaaaatacaaaaaattagccaggcgtggcagtgtgcacctgtagtcccagctactcaggaggctgaggcaggagaatcgcttgaaccctgaaggtggaggttgcagtgagccaagataacgccactgcattccagcctggatggcagagcaagactccatctccaaaaaaaaaaaaaaaaa

SEQ ID NO: 335 - DNA, 203 bp, Homo sapiens
ggtttaggttaagtataacctaaaggaaggcctgtaacgaaaagactcaggctgaatgctaaccagtggggaaaacactgggggcagtagttccttgatgtccctcaatcctctccactaagcagtgacatgggcttaaatctggggcctactttccctaagctcagggaagcactgcctgacagtggatgtgggggtggggg

SEQ ID NO: 336 - DNA, 5377 bp, Homo sapiens
cgtcgtgctctgaggaggccaggagatttctggcggcgccggcgccattttgctggagcctgcgaccgagtgggagtggagtggagcggctgtggttgccgactctttcctcttccccacggtccagtcagcgggttaattaggccatcggccctcgagccgagacttgtctcttatttagttctggggagcgcctcgtcgacatgagtgatgtggaggaaaacaacttcgagggcagagtgagtacaaagccgcgggagccgtctaggcggcggcccaatgctcggggtttcacgggaacaagcgcggtcgggcggggttgcgggtagtcccgcgaggagcaacctctggagccatcgcgattgattcctcccatcccaagatggcttctgggttccactccttccccaaacaccacggataacacccctcccccttttttggaggctgactgatacctggacttctgggtcctcttccctccccgcccccgcattgcttcctcccttctccccacccctgaggcttccttatgtctgctccgaggtgtgggtccccgtcgcggttgggcgggaggaggcggcagggagctcccctccgtccggatagtggtaggtgcttcctgcggtggcatttctggcgaccccgagcatcgtagagggtctcgggatcgaaagtgcgcggggctgctttccgggcggggagaagctggcgtgggactagctggggcctgtgtctccttggctctctatttcagtgagcggccgcgtctctgttggaaccggcggcgttgcgtctaaaaaggcgaaagccttgaggttgaaggtgggacgagcctaatgaagtggttagtcaacgaccgcaccgacccttaagcgttcttaagacgagagctgtgaggggaaactacgcaaggagcccttttcccttaatgtcccttcgactttcctttcacttcgaaatgaatgtggaaatgctgtcacgccttatttttctaattcctcgatgttgggttttttctcttctttatatctcaacttttaatgctcttcttcctatgacctttcatctaaaaactgaccactcctttacaggtttttacggtaaaaaaaaaaaaatctgtctttctttaatcttacatagctgaacgaattcattggctcagtatttttaagataactagtcagtatatactgttctgtaacttaaaagatgacctgaaaattaacaggccctctcccatttctcttctcactctatcccccaccgaagagggctcagaaaaaagtttttattaatatatttggggtcggagaaatacaaacatcacaaagaatacgatatccccagcttaaatgtactggaacgtttgtcagtgagtttcatttccaaagtttaccctacatagggaattgtagaagtgagttagtagaagtgagttcgtgtgaaaccctggaaagaaaacaaaagccccatgcaacacgttccgggctgttgtgtagatgtttattctagtcactaggggaagcacataaaaacacctgaggtgtgtgtgctgaagggcgaattttgtccttttggggagttcatgatataaacatctagaaccaaaaagtcaaatcagaaggtcagtttaggctttagttctctttgaggaaagatttaaagcaatagactataatagttacccggtagactaaaaaatttgcctttaattcttttgattggaatttttttttacaaagtttggagcatggaaacaaatgaaaattgaacctgcttattttttaggatggtgtattgatggccccaacagaactttctaaaatcatgcgataaacatatatgatagtagttgtaaaatgcttcttgttttgaaaatgttgagtaattatcgatagaaattttgctgtccattcatacattccttcaattaactttcattgttaaaaaattgggggattgatgtttggtttggtttgtggggagtgaagaggactactggagggaccttgtttgcttgctttttttctttttttaatttatcatcaagtctaggaaaggagtaagttgccgacaattgtcacttttccctcctaagaaagtaacatgttaagattcccacctaccagcctgggtgacagtgagactcccgtctcaaaaaaaaaaaaaaagattcccacccacttttaagctaaagtatatgtaggcattaaagatttatttaatagaaataaagggccctcttacggccctttgtggtcataggaaatatttttttcacaagtggtacccaagtgtattttagtgtaaatcaactagtgcttgtaggctcacctgttgtatctttttatttttcgtcttttagtttttataggatgagataattgtctttatttgtaattggttaaagaattagaacaatgcgagaagcttgtctggagatgccctttttaaaatcgtttctggccgggcgcagtggctcacgcctgtaatccaacaatttttgggaggctgaggcgggtggattacttgaggttaggagttcgagactagcctgcccaacgtggtgaaaccctgtctctactaaaaatacaaaattagccgggcgtggtggcgtgcgcctgtgatcacagctacttaggaggctgaggcaggagaattacttgaacctgggaggcggaattgcgccacgacactccagtctaggcaacagaatgagactcttgtctcaaaaataagtaaatacgtaggtccataaaagcaattttaagtggagatgtcctttggagctgggagtgaaggtagcacttaagcggtggctttgcatgtcttgataaaagtaatgagttgtttgcctcaatacagcttcaactaaaattcggattttgagctcaaaaaatgttaatgcccttcatagaaattaaggggaatggaaatcttttcttaacattttacacctctacccctaaaattttaagaactgtactttataaaaatgtgcaattttcatacagcatcccagtgttgatcatggaggttaatgattctttattgttagggacctatcttgtaattccagagttatttatgttttctacagttgaagaggaaaaataccgcttcttattgcctccttttcaggatttcttctggcttcttgagtagctggagtatttttgagagactcctacaggccctgcggggtggcacatgcctgtaatcctagctacttaggaggctgaggtgggagaattgcttaaacccgggaggcagaggttgcagtgagccgagatcgcatcactgcactccagcctgggcgacagagcaagactctgtctcgaaaaaaaaaaaggcaaacaaatttatctgtatcaatttggaattaaaagatttgtgtgtatagattttttgttaaaaatagaagaaatagggggagggtccttttctgaaatctgagaatgatagggatgatgactatcaaaacccaggcctgtgactggcttgtttaaaaacaaaacaaggccggcccggtggctcacgcctgtaatcccagcgctttgggaggctgaggcgggcggatcacaaggtcaagagatggagaccatcctggccaatatggtgaaatacagtctctactaaaaatacaaaaattagctgggcgtggtggcgcgcgtctgtagtcccagctactcgggagggtgaggcagagaatcacttgaacccgggaggcggaggttgcagtgagccgaggtcggccactgcactccagcctggcaatagagcgagactcgtctcaaaaacaaaacaaaaaaaaacacagaacttttaaattgggcttaaaatttttttgtgtatgaagttttaagataaatgtgagagatgtcatagcattttgcttattcagcgtctttagcaatttaattccatatatcatcaaattgaccttacataagggtaaagctttctttcttatagtagggatagtgttaacctaagagagtcttgggtttaatctattttcctaaatttaagtactatcatttatctgattttaatgctttcagttgttctcctctccccttccatttaagcaaagaatttgtaaacttaaaaaaaattaaaatctcaaatttttatatttgaggttctttcactgaaggatgttgatctgctcaatataagtagagggcaagattttgaaaaggagcagtgcaagtaattatacccacagcgcataactaattttacagatctgtcatagaggcttatactttgtaccactcattaaatggaatatagaaccttgagatctgaaagaatgtccagggatttaaatatttagggatgtgtggtttggaaaacactttgtctgtgggcttaattttgtaaatcaaccaaactctaacctacgatgtagcatgtgtattataagaagtgtgaaatgtcatcaataatcagcatagtagtttcctagaacttgactggcagaaaactttctttgatagtatcagtgggtgctcacccattagataactaaaagatgtgtattcacgtgctaatgaattaaaactgattgctatttgttcatatgtcctcacaaatttagcaagacaggcatggaggtgaaaaaaatagtaacaactagatgagggaaagattgtatacactgaagaaaagttgagaggagaatactaaagggaaatatggtttcccttccctccttttaagttacttatatatatagttatatataatccttactgtcccatgactttcaccaaagatggagtgactaggcctgactgatatgtagaagaaaagttgtgatctttccttgaaaccaggaccctatcatctgacttaccaagattcataaatactgtataactccagaagattagaacataatgttaaatcacattagtccttacaaacttgttttttctacctttgaaattgccacttatacattagttttttgaacattacaattgatcaggatatataagctatgagacttatgaaccacgtttaaaatttgtacaaaagattataaattttacaggtgatttcacaattatggcatgagtttaaatttgattatatgtgggtgtcagttactaaatcatgtatttatgataagacttctaaattttagagaataaggaaacatacagaattagaatatgtttgagtctttgcagataaagaccacattgacttcagaatgcagcatataggcatgctgcatttaaaagaagggaaattattatttcaatttaatatgagcagtcgctatcttctttttaagggatttgttctaatagcagttacggtttaagaagataatggaagtgttgctttaacttcatag

SEQ ID NO: 337 - DNA, 2384 bp, Homo sapiens
aatttcggtacatttcccttctttttgggtacttgtgattttcctcaatgcactagtgtgtatctatggaaatagagcgccagtgtcataaagtagcaggaaaatacatttttagtaagtctgttttacaagcttatactcatagacttggacttgagtaaatttggccctattaaatggcatagaatttgcctggccttaatgttagagtaagttacagtatagcatttaatagtttatttattttaatggatagcacatatatatattgtgttggaatttctttttatagtatgacacaggctatattaaaagactgcagttattgcttgctgtaggaattgttcatgttccgcaacattgtgtacatgtatataataacccttttcctgattaaaagaatagtacatggttattgtggttattcacagtgtgtaaaatacaactctattttaacacagaaagacaattcttaaccagcttgtattggttacactataacactttcttagtgttttagttagttccctccttttaatttttggccatttccttcaaccaacagcagggtcatcttgataataaagaatagtttaaacaagcaggccgggtgcagtggctcatgcctgtaatcccagcactttgcgaggctgaggcgggtggatcacttgaggtcaggagttcgaggccagcctggccaatgtggtgaaaccccgtctctactaaaataaaatacaaaagttagccaggtgcgatggcgggtgcctgtaatcccagctacccaggaagctgaggcagaattgcttgaacccaggagttggaggttgcaatgagaagattgtgccactgcactccagcctgggtgacagaaaaaccaaacaagcaaataaacatcaaaacaaaaacctgttaaagcaggttgtgctgtgagaagaacttttctgcctggcttctgctttatagcctataagatagactggaggcctatttaagacttttgttaaaattcatgatacgagttgagttattaatctgcccatttaaaccgggcagtgtatttttaatggttattggatgcaggagccagattactgaggaaatggtaggattccttgactggacagctttaagaacaagtagtctagtgaaacagggcagataccacccattcccagcaatcttttttgtttgcaatttcaattcattttccaaattgtggatagttttatgaatttctttgagaaaaagttgaaattatttcataatgaagacgagtcagagagaaaaggattagcctagcatttgtcctctttatataaaggacttcttatagcctgattcctaatgcagagttcagtgaaagtgacatttatttggtaacagcttttgagaaatgttactttatttctaaataattatatacttggcagtttattcttccagttaagtttactaatagttactgatttgttaatataagtttgtaagttgtttttgaaagttaaaatgaagctgggtgtggtggctcacacctgtaatcccagcgctttgggaggccaaggcgggcagatcaaggagtcaggagatggagaccagcctggccaacatagggaaaccctatctctactaaaaacacaaaaattagctgggtgtgatggcgtgcacctgtaagctgagctactcaggaggctaaggcaggagaatcgcttgaatccgggaggcggaggttgcagtgagctgagatcaggtgccactgtactccagcctgagctacagagcaagactccatctcaaaaaaaaaaaaaatagttaaaatcatagtgacaactttgtagctaggagttagagacagctaagaggactgtttttagcttagatgtttccatgaagaaatttgtgcagactgagatttcctctgagataaaaagaaagaagggcagacaacaaaggaggttaggtatttgtgacacctttgataataaaaagcaaagcttcttttaaaataaatctgatgttggccgggcgcggtggctcacacctgtaatcccagcactttgggaggctgaggcgggcagatcactagaggtcaggagtttgagaccagcctggccaacatgggaaaaccccatctctattaaaaatacaaaaattagccaggcaaggtggtgcatgcctgtaatcccagctgctcaggaggctgaggcaggagaatcacttgaacccaggaggtggaggttgcagtgagcctagatcgcaccattacactccagcctgggtgacagaatgagactcctccttcttaaaataaataagctaacatctcttaaaaagacattctatcataccataatgctttgttgctactccaaaactgggatttaaaa

SEQ ID NO: 338 - DNA, 33 bp, Homo sapiens
tgccactgcactccagcctgggcaacagagcga

SEQ ID NO: 339 - DNA, 1132 bp, Homo sapiens
gcccacctcagcctcccaaagtgctaggattatgtttctgtaattgtaatacatttattgtttttagaaactgtctttgctttagtggtaattttcaataaaaatagaaatagcagtggagttattaaaagagcattagttacatttttccctttttcattatcttcaaatattatatatagtaagtttgacctttttaaaatgtatacttgtatcagttttaacacatacatagattcctgtaactgtcaccactataagggtaaagaacagttagttccttcacctttgaagtcaaaccccacctctatcccaacacttggcaaccgctgatctttctccgtctcaatagctttgccttttctctttttttttcttatttttttttttgagacagcgtcttgctctgtcgcccgagctggagtgcagtgaggcaatctcggctcactgcaacctccgcctcctgggttcaagcagttctcctgccttagcctccctagtagctgggattataggcacgcaccaccacacccggctgatttttttgtatttttagtagaaatggggtttcaccatgttggccaggctggtctcaaactcttgacctcaagtgatccacctgcctcggcctcccaaagtgctgggattacaggcgtgagccactgtgcccaatcaggactttttttttttaaatttacattcaacttgtcatttttttcttgtatggattgtgccttcagagtcacacctaagagccctttgcctaagcaaaggtcatgaagattttctcatatgtttccttttaaaagtattgtggttggccaggtgccatggcttatgcctgtaatctcagcactttgagaagctgaggtgggcagattacgaggtcaggagatcgagaccatcctggctaatgcggtgaaaccccatctctactaaaaatacaaaaaaaaaaaaaaaattagccgggcgtggtggcgggcgcctgtagtcccagctacttgagaggttgaggcaggagaatagtgtgaacccgggaggtggagcttgcagtgagccgagatcgcgccactgcactccagcctgggcaacacagtgagactccatctcaaaaaaaaaaaaaaaagtatta

SEQ ID NO: 340 - DNA, 5088 bp, Homo sapiens
  misc_feature (197): n equals a,t,g, or c
  misc_feature (198): n equals a,t,g, or c
  misc_feature (199): n equals a,t,g, or c
  misc_feature (200): n equals a,t,g, or c
  misc_feature (201): n equals a,t,g, or c
  misc_feature (202): n equals a,t,g, or c
  misc_feature (203): n equals a,t,g, or c
  misc_feature (204): n equals a,t,g, or c
  misc_feature (205): n equals a,t,g, or c
  misc_feature (206): n equals a,t,g, or c
  misc_feature (207): n equals a,t,g, or c
  misc_feature (208): n equals a,t,g, or c
  misc_feature (209): n equals a,t,g, or c
  misc_feature (210): n equals a,t,g, or c
  misc_feature (211): n equals a,t,g, or c
  misc_feature (212): n equals a,t,g, or c
  misc_feature (213): n equals a,t,g, or c
  misc_feature (214): n equals a,t,g, or c
  misc_feature (215): n equals a,t,g, or c
  misc_feature (216): n equals a,t,g, or c
  misc_feature (217): n equals a,t,g, or c
  misc_feature (218): n equals a,t,g, or c
  misc_feature (219): n equals a,t,g, or c
  misc_feature (220): n equals a,t,g, or c
  misc_feature (221): n equals a,t,g, or c
  misc_feature (222): n equals a,t,g, or c
  misc_feature (223): n equals a,t,g, or c
  misc_feature (224): n equals a,t,g, or c
  misc_feature (225): n equals a,t,g, or c
  misc_feature (226): n equals a,t,g, or c
  misc_feature (227): n equals a,t,g, or c
  misc_feature (228): n equals a,t,g, or c
  misc_feature (229): n equals a,t,g, or c
  misc_feature (230): n equals a,t,g, or c
  misc_feature (231): n equals a,t,g, or c
  misc_feature (232): n equals a,t,g, or c
  misc_feature (233): n equals a,t,g, or c
  misc_feature (234): n equals a,t,g, or c
  misc_feature (235): n equals a,t,g, or c
  misc_feature (236): n equals a,t,g, or c
  misc_feature (237): n equals a,t,g, or c
  misc_feature (238): n equals a,t,g, or c
  misc_feature (239): n equals a,t,g, or c
  misc_feature (240): n equals a,t,g, or c
  misc_feature (241): n equals a,t,g, or c
  misc_feature (242): n equals a,t,g, or c
  misc_feature (243): n equals a,t,g, or c
  misc_feature (244): n equals a,t,g, or c
  misc_feature (245): n equals a,t,g, or c
  misc_feature (246): n equals a,t,g, or c
  misc_feature (247): n equals a,t,g, or c
  misc_feature (248): n equals a,t,g, or c
  misc_feature (249): n equals a,t,g, or c
  misc_feature (250): n equals a,t,g, or c
  misc_feature (251): n equals a,t,g, or c
  misc_feature (252): n equals a,t,g, or c
  misc_feature (253): n equals a,t,g, or c
  misc_feature (254): n equals a,t,g, or c
  misc_feature (255): n equals a,t,g, or c
  misc_feature (256): n equals a,t,g, or c
  misc_feature (257): n equals a,t,g, or c
  misc_feature (258): n equals a,t,g, or c
  misc_feature (259): n equals a,t,g, or c
  misc_feature (260): n equals a,t,g, or c
  misc_feature (261): n equals a,t,g, or c
  misc_feature (262): n equals a,t,g, or c
  misc_feature (263): n equals a,t,g, or c
  misc_feature (264): n equals a,t,g, or c
  misc_feature (265): n equals a,t,g, or c
  misc_feature (266): n equals a,t,g, or c
  misc_feature (267): n equals a,t,g, or c
  misc_feature (268): n equals a,t,g, or c
  misc_feature (269): n equals a,t,g, or c
  misc_feature (270): n equals a,t,g, or c
  misc_feature (271): n equals a,t,g, or c
  misc_feature (272): n equals a,t,g, or c
  misc_feature (273): n equals a,t,g, or c
  misc_feature (274): n equals a,t,g, or c
  misc_feature (275): n equals a,t,g, or c
  misc_feature (276): n equals a,t,g, or c
  misc_feature (277): n equals a,t,g, or c
  misc_feature (278): n equals a,t,g, or c
  misc_feature (279): n equals a,t,g, or c
  misc_feature (280): n equals a,t,g, or c
  misc_feature (281): n equals a,t,g, or c
  misc_feature (282): n equals a,t,g, or c
  misc_feature (283): n equals a,t,g, or c
  misc_feature (284): n equals a,t,g, or c
  misc_feature (285): n equals a,t,g, or c
  misc_feature (286): n equals a,t,g, or c
  misc_feature (287): n equals a,t,g, or c
  misc_feature (288): n equals a,t,g, or c
  misc_feature (289): n equals a,t,g, or c
  misc_feature (290): n equals a,t,g, or c
  misc_feature (291): n equals a,t,g, or c
  misc_feature (292): n equals a,t,g, or c
  misc_feature (293): n equals a,t,g, or c
  misc_feature (294): n equals a,t,g, or c
  misc_feature (295): n equals a,t,g, or c
  misc_feature (296): n equals a,t,g, or c
  misc_feature (297): n equals a,t,g, or c
  misc_feature (298): n equals a,t,g, or c
  misc_feature (299): n equals a,t,g, or c
  misc_feature (300): n equals a,t,g, or c
  misc_feature (301): n equals a,t,g, or c
  misc_feature (302): n equals a,t,g, or c
  misc_feature (303): n equals a,t,g, or c
  misc_feature (304): n equals a,t,g, or c
  misc_feature (305): n equals a,t,g, or c
  misc_feature (306): n equals a,t,g, or c
  misc_feature (307): n equals a,t,g, or c
  misc_feature (308): n equals a,t,g, or c
  misc_feature (309): n equals a,t,g, or c
  misc_feature (310): n equals a,t,g, or c
  misc_feature (311): n equals a,t,g, or c
  misc_feature (312): n equals a,t,g, or c
  misc_feature (313): n equals a,t,g, or c
  misc_feature (314): n equals a,t,g, or c
  misc_feature (315): n equals a,t,g, or c
  misc_feature (316): n equals a,t,g, or c
  misc_feature (317): n equals a,t,g, or c
  misc_feature (318): n equals a,t,g, or c
  misc_feature (319): n equals a,t,g, or c
  misc_feature (320): n equals a,t,g, or c
  misc_feature (321): n equals a,t,g, or c
  misc_feature (322): n equals a,t,g, or c
  misc_feature (323): n equals a,t,g, or c
  misc_feature (324): n equals a,t,g, or c
  misc_feature (325): n equals a,t,g, or c
  misc_feature (326): n equals a,t,g, or c
  misc_feature (327): n equals a,t,g, or c
  misc_feature (328): n equals a,t,g, or c
  misc_feature (329): n equals a,t,g, or c
  misc_feature (330): n equals a,t,g, or c
  misc_feature (331): n equals a,t,g, or c
  misc_feature (332): n equals a,t,g, or c
  misc_feature (333): n equals a,t,g, or c
  misc_feature (334): n equals a,t,g, or c
  misc_feature (335): n equals a,t,g, or c
  misc_feature (336): n equals a,t,g, or c
  misc_feature (337): n equals a,t,g, or c
  misc_feature (338): n equals a,t,g, or c
  misc_feature (339): n equals a,t,g, or c
  misc_feature (340): n equals a,t,g, or c
  misc_feature (341): n equals a,t,g, or c
  misc_feature (342): n equals a,t,g, or c
  misc_feature (343): n equals a,t,g, or c
  misc_feature (344): n equals a,t,g, or c
  misc_feature (345): n equals a,t,g, or c
  misc_feature (346): n equals a,t,g, or c
  misc_feature (347): n equals a,t,g, or c
  misc_feature (348): n equals a,t,g, or c
  misc_feature (349): n equals a,t,g, or c
  misc_feature (350): n equals a,t,g, or c
  misc_feature (351): n equals a,t,g, or c
  misc_feature (352): n equals a,t,g, or c
  misc_feature (353): n equals a,t,g, or c
  misc_feature (354): n equals a,t,g, or c
  misc_feature (355): n equals a,t,g, or c
  misc_feature (356): n equals a,t,g, or c
  misc_feature (357): n equals a,t,g, or c
  misc_feature (358): n equals a,t,g, or c
  misc_feature (359): n equals a,t,g, or c
  misc_feature (360): n equals a,t,g, or c
  misc_feature (361): n equals a,t,g, or c
  misc_feature (362): n equals a,t,g, or c
  misc_feature (363): n equals a,t,g, or c
  misc_feature (364): n equals a,t,g, or c
  misc_feature (365): n equals a,t,g, or c
  misc_feature (366): n equals a,t,g, or c
  misc_feature (367): n equals a,t,g, or c
  misc_feature (368): n equals a,t,g, or c
  misc_feature (369): n equals a,t,g, or c
  misc_feature (370): n equals a,t,g, or c
  misc_feature (371): n equals a,t,g, or c
  misc_feature (372): n equals a,t,g, or c
  misc_feature (373): n equals a,t,g, or c
  misc_feature (374): n equals a,t,g, or c
  misc_feature (375): n equals a,t,g, or c
  misc_feature (376): n equals a,t,g, or c
  misc_feature (377): n equals a,t,g, or c
  misc_feature (378): n equals a,t,g, or c
  misc_feature (379): n equals a,t,g, or c
  misc_feature (380): n equals a,t,g, or c
  misc_feature (381): n equals a,t,g, or c
  misc_feature (382): n equals a,t,g, or c
  misc_feature (383): n equals a,t,g, or c
  misc_feature (384): n equals a,t,g, or c
  misc_feature (385): n equals a,t,g, or c
  misc_feature (386): n equals a,t,g, or c
  misc_feature (387): n equals a,t,g, or c
  misc_feature (388): n equals a,t,g, or c
  misc_feature (389): n equals a,t,g, or c
  misc_feature (390): n equals a,t,g, or c
  misc_feature (391): n equals a,t,g, or c
  misc_feature (392): n equals a,t,g, or c
  misc_feature (393): n equals a,t,g, or c
  misc_feature (394): n equals a,t,g, or c
  misc_feature (395): n equals a,t,g, or c
  misc_feature (396): n equals a,t,g, or c
  misc_feature (397): n equals a,t,g, or c
  misc_feature (398): n equals a,t,g, or c
  misc_feature (399): n equals a,t,g, or c
  misc_feature (400): n equals a,t,g, or c
  misc_feature (401): n equals a,t,g, or c
  misc_feature (402): n equals a,t,g, or c
  misc_feature (403): n equals a,t,g, or c
  misc_feature (404): n equals a,t,g, or c
  misc_feature (405): n equals a,t,g, or c
  misc_feature (406): n equals a,t,g, or c
  misc_feature (407): n equals a,t,g, or c
  misc_feature (408): n equals a,t,g, or c
  misc_feature (409): n equals a,t,g, or c
  misc_feature (410): n equals a,t,g, or c
  misc_feature (411): n equals a,t,g, or c
  misc_feature (412): n equals a,t,g, or c
  misc_feature (413): n equals a,t,g, or c
  misc_feature (414): n equals a,t,g, or c
  misc_feature (415): n equals a,t,g, or c
  misc_feature (416): n equals a,t,g, or c
  misc_feature (417): n equals a,t,g, or c
  misc_feature (418): n equals a,t,g, or c
  misc_feature (419): n equals a,t,g, or c
  misc_feature (420): n equals a,t,g, or c
  misc_feature (421): n equals a,t,g, or c
  misc_feature (422): n equals a,t,g, or c
  misc_feature (423): n equals a,t,g, or c
  misc_feature (424): n equals a,t,g, or c
  misc_feature (425): n equals a,t,g, or c
  misc_feature (426): n equals a,t,g, or c
  misc_feature (427): n equals a,t,g, or c
  misc_feature (428): n equals a,t,g, or c
  misc_feature (429): n equals a,t,g, or c
  misc_feature (430): n equals a,t,g, or c
  misc_feature (431): n equals a,t,g, or c
  misc_feature (432): n equals a,t,g, or c
  misc_feature (433): n equals a,t,g, or c
  misc_feature (434): n equals a,t,g, or c
  misc_feature (435): n equals a,t,g, or c
  misc_feature (436): n equals a,t,g, or c
  misc_feature (437): n equals a,t,g, or c
  misc_feature (438): n equals a,t,g, or c
  misc_feature (439): n equals a,t,g, or c
  misc_feature (440): n equals a,t,g, or c
  misc_feature (441): n equals a,t,g, or c
  misc_feature (442): n equals a,t,g, or c
  misc_feature (443): n equals a,t,g, or c
  misc_feature (444): n equals a,t,g, or c
  misc_feature (445): n equals a,t,g, or c
  misc_feature (446): n equals a,t,g, or c
  misc_feature (447): n equals a,t,g, or c
  misc_feature (448): n equals a,t,g, or c
  misc_feature (449): n equals a,t,g, or c
  misc_feature (450): n equals a,t,g, or c
  misc_feature (451): n equals a,t,g, or c
  misc_feature (452): n equals a,t,g, or c
  misc_feature (453): n equals a,t,g, or c
  misc_feature (454): n equals a,t,g, or c
  misc_feature (455): n equals a,t,g, or c
  misc_feature (456): n equals a,t,g, or c
  misc_feature (457): n equals a,t,g, or c
  misc_feature (458): n equals a,t,g, or c
  misc_feature (459): n equals a,t,g, or c
  misc_feature (460): n equals a,t,g, or c
  misc_feature (461): n equals a,t,g, or c
  misc_feature (462): n equals a,t,g, or c
  misc_feature (463): n equals a,t,g, or c
  misc_feature (464): n equals a,t,g, or c
  misc_feature (465): n equals a,t,g, or c
  misc_feature (466): n equals a,t,g, or c
  misc_feature (467): n equals a,t,g, or c
  misc_feature (468): n equals a,t,g, or c
  misc_feature (469): n equals a,t,g, or c
  misc_feature (470): n equals a,t,g, or c
  misc_feature (471): n equals a,t,g, or c
  misc_feature (472): n equals a,t,g, or c
  misc_feature (473): n equals a,t,g, or c
  misc_feature (474): n equals a,t,g, or c
  misc_feature (475): n equals a,t,g, or c
  misc_feature (476): n equals a,t,g, or c
  misc_feature (477): n equals a,t,g, or c
  misc_feature (478): n equals a,t,g, or c
  misc_feature (479): n equals a,t,g, or c
  misc_feature (480): n equals a,t,g, or c
  misc_feature (481): n equals a,t,g, or c
  misc_feature (482): n equals a,t,g, or c
  misc_feature (483): n equals a,t,g, or c
  misc_feature (484): n equals a,t,g, or c
  misc_feature (485): n equals a,t,g, or c
  misc_feature (486): n equals a,t,g, or c
  misc_feature (487): n equals a,t,g, or c
  misc_feature (488): n equals a,t,g, or c
  misc_feature (489): n equals a,t,g, or c
  misc_feature (490): n equals a,t,g, or c
  misc_feature (491): n equals a,t,g, or c
  misc_feature (492): n equals a,t,g, or c
  misc_feature (493): n equals a,t,g, or c
  misc_feature (494): n equals a,t,g, or c
  misc_feature (495): n equals a,t,g, or c
  misc_feature (496): n equals a,t,g, or c
  misc_feature (497): n equals a,t,g, or c
  misc_feature (498): n equals a,t,g, or c
  misc_feature (499): n equals a,t,g, or c
  misc_feature (500): n equals a,t,g, or c
  misc_feature (501): n equals a,t,g, or c
  misc_feature (502): n equals a,t,g, or c
  misc_feature (503): n equals a,t,g, or c
  misc_feature (504): n equals a,t,g, or c
  misc_feature (505): n equals a,t,g, or c
  misc_feature (506): n equals a,t,g, or c
  misc_feature (507): n equals a,t,g, or c
  misc_feature (508): n equals a,t,g, or c
  misc_feature (509): n equals a,t,g, or c
  misc_feature (510): n equals a,t,g, or c
  misc_feature (511): n equals a,t,g, or c
  misc_feature (512): n equals a,t,g, or c
  misc_feature (513): n equals a,t,g, or c
  misc_feature (514): n equals a,t,g, or c
  misc_feature (515): n equals a,t,g, or c
  misc_feature (516): n equals a,t,g, or c
  misc_feature (517): n equals a,t,g, or c
  misc_feature (518): n equals a,t,g, or c
  misc_feature (519): n equals a,t,g, or c
  misc_feature (520): n equals a,t,g, or c
  misc_feature (521): n equals a,t,g, or c
  misc_feature (522): n equals a,t,g, or c
  misc_feature (523): n equals a,t,g, or c
  misc_feature (524): n equals a,t,g, or c
  misc_feature (525): n equals a,t,g, or c
  misc_feature (526): n equals a,t,g, or c
  misc_feature (527): n equals a,t,g, or c
  misc_feature (528): n equals a,t,g, or c
  misc_feature (529): n equals a,t,g, or c
  misc_feature (530): n equals a,t,g, or c
  misc_feature (531): n equals a,t,g, or c
  misc_feature (532): n equals a,t,g, or c
  misc_feature (533): n equals a,t,g, or c
  misc_feature (534): n equals a,t,g, or c
  misc_feature (535): n equals a,t,g, or c
  misc_feature (536): n equals a,t,g, or c
  misc_feature (537): n equals a,t,g, or c
  misc_feature (538): n equals a,t,g, or c
  misc_feature (539): n equals a,t,g, or c
  misc_feature (540): n equals a,t,g, or c
  misc_feature (541): n equals a,t,g, or c
  misc_feature (542): n equals a,t,g, or c
  misc_feature (543): n equals a,t,g, or c
  misc_feature (544): n equals a,t,g, or c
  misc_feature (545): n equals a,t,g, or c
  misc_feature (546): n equals a,t,g, or c
  misc_feature (547): n equals a,t,g, or c
  misc_feature (548): n equals a,t,g, or c
  misc_feature (549): n equals a,t,g, or c
  misc_feature (550): n equals a,t,g, or c
  misc_feature (551): n equals a,t,g, or c
  misc_feature (552): n equals a,t,g, or c
  misc_feature (553): n equals a,t,g, or c
  misc_feature (554): n equals a,t,g, or c
  misc_feature (555): n equals a,t,g, or c
  misc_feature (556): n equals a,t,g, or c
  misc_feature (557): n equals a,t,g, or c
  misc_feature (558): n equals a,t,g, or c
  misc_feature (559): n equals a,t,g, or c
  misc_feature (560): n equals a,t,g, or c
  misc_feature (561): n equals a,t,g, or c
  misc_feature (562): n equals a,t,g, or c
  misc_feature (563): n equals a,t,g, or c
  misc_feature (564): n equals a,t,g, or c
  misc_feature (565): n equals a,t,g, or c
  misc_feature (566): n equals a,t,g, or c
  misc_feature (567): n equals a,t,g, or c
  misc_feature (568): n equals a,t,g, or c
  misc_feature (569): n equals a,t,g, or c
  misc_feature (570): n equals a,t,g, or c
  misc_feature (571): n equals a,t,g, or c
  misc_feature (572): n equals a,t,g, or c
  misc_feature (573): n equals a,t,g, or c
  misc_feature (574): n equals a,t,g, or c
  misc_feature (575): n equals a,t,g, or c
  misc_feature (576): n equals a,t,g, or c
  misc_feature (577): n equals a,t,g, or c
  misc_feature (578): n equals a,t,g, or c
  misc_feature (579): n equals a,t,g, or c
  misc_feature (580): n equals a,t,g, or c
  misc_feature (581): n equals a,t,g, or c
  misc_feature (582): n equals a,t,g, or c
  misc_feature (583): n equals a,t,g, or c
  misc_feature (584): n equals a,t,g, or c
  misc_feature (585): n equals a,t,g, or c
  misc_feature (586): n equals a,t,g, or c
  misc_feature (587): n equals a,t,g, or c
  misc_feature (588): n equals a,t,g, or c
  misc_feature (589): n equals a,t,g, or c
  misc_feature (590): n equals a,t,g, or c
  misc_feature (591): n equals a,t,g, or c
  misc_feature (592): n equals a,t,g, or c
  misc_feature (593): n equals a,t,g, or c
  misc_feature (594): n equals a,t,g, or c
  misc_feature (595): n equals a,t,g, or c
  misc_feature (596): n equals a,t,g, or c
  misc_feature (597): n equals a,t,g, or c
  misc_feature (598): n equals a,t,g, or c
  misc_feature (599): n equals a,t,g, or c
  misc_feature (600): n equals a,t,g, or c
  misc_feature (601): n equals a,t,g, or c
  misc_feature (602): n equals a,t,g, or c
  misc_feature (603): n equals a,t,g, or c
  misc_feature (604): n equals a,t,g, or c
  misc_feature (605): n equals a,t,g, or c
  misc_feature (606): n equals a,t,g, or c
  misc_feature (607): n equals a,t,g, or c
  misc_feature (608): n equals a,t,g, or c
  misc_feature (609): n equals a,t,g, or c
  misc_feature (610): n equals a,t,g, or c
  misc_feature (611): n equals a,t,g, or c
  misc_feature (612): n equals a,t,g, or c
  misc_feature (613): n equals a,t,g, or c
  misc_feature (614): n equals a,t,g, or c
  misc_feature (615): n equals a,t,g, or c
  misc_feature (616): n equals a,t,g, or c
  misc_feature (617): n equals a,t,g, or c
  misc_feature (618): n equals a,t,g, or c
  misc_feature (619): n equals a,t,g, or c
  misc_feature (620): n equals a,t,g, or c
  misc_feature (621): n equals a,t,g, or c
  misc_feature (622): n equals a,t,g, or c
  misc_feature (623): n equals a,t,g, or c
  misc_feature (624): n equals a,t,g, or c
  misc_feature (625): n equals a,t,g, or c
  misc_feature (626): n equals a,t,g, or c
  misc_feature (627): n equals a,t,g, or c
  misc_feature (628): n equals a,t,g, or c
  misc_feature (629): n equals a,t,g, or c
  misc_feature (630): n equals a,t,g, or c
  misc_feature (631): n equals a,t,g, or c
  misc_feature (632): n equals a,t,g, or c
  misc_feature (633): n equals a,t,g, or c
  misc_feature (634): n equals a,t,g, or c
  misc_feature (635): n equals a,t,g, or c
  misc_feature (636): n equals a,t,g, or c
  misc_feature (637): n equals a,t,g, or c
  misc_feature (638): n equals a,t,g, or c
  misc_feature (639): n equals a,t,g, or c
  misc_feature (640): n equals a,t,g, or c
  misc_feature (641): n equals a,t,g, or c
  misc_feature (642): n equals a,t,g, or c
  misc_feature (643): n equals a,t,g, or c
  misc_feature (644): n equals a,t,g, or c
  misc_feature (645): n equals a,t,g, or c
  misc_feature (646): n equals a,t,g, or c
  misc_feature (647): n equals a,t,g, or c
  misc_feature (648): n equals a,t,g, or c
  misc_feature (649): n equals a,t,g, or c
  misc_feature (650): n equals a,t,g, or c
  misc_feature (651): n equals a,t,g, or c
  misc_feature (652): n equals a,t,g, or c
  misc_feature (653): n equals a,t,g, or c
  misc_feature (654): n equals a,t,g, or c
  misc_feature (655): n equals a,t,g, or c
  misc_feature (656): n equals a,t,g, or c
  misc_feature (657): n equals a,t,g, or c
  misc_feature (658): n equals a,t,g, or c
  misc_feature (659): n equals a,t,g, or c
  misc_feature (660): n equals a,t,g, or c
  misc_feature (661): n equals a,t,g, or c
  misc_feature (662): n equals a,t,g, or c
  misc_feature (663): n equals a,t,g, or c
  misc_feature (664): n equals a,t,g, or c
  misc_feature (665): n equals a,t,g, or c
  misc_feature (666): n equals a,t,g, or c
  misc_feature (667): n equals a,t,g, or c
  misc_feature (668): n equals a,t,g, or c
  misc_feature (669): n equals a,t,g, or c
  misc_feature (670): n equals a,t,g, or c
  misc_feature (671): n equals a,t,g, or c
  misc_feature (672): n equals a,t,g, or c
  misc_feature (673): n equals a,t,g, or c
  misc_feature (674): n equals a,t,g, or c
  misc_feature (675): n equals a,t,g, or c
  misc_feature (676): n equals a,t,g, or c
  misc_feature (677): n equals a,t,g, or c
  misc_feature (678): n equals a,t,g, or c
  misc_feature (679): n equals a,t,g, or c
  misc_feature (680): n equals a,t,g, or c
  misc_feature (681): n equals a,t,g, or c
  misc_feature (682): n equals a,t,g, or c
  misc_feature (683): n equals a,t,g, or c
  misc_feature (684): n equals a,t,g, or c
  misc_feature (685): n equals a,t,g, or c
  misc_feature (686): n equals a,t,g, or c
  misc_feature (687): n equals a,t,g, or c
  misc_feature (688): n equals a,t,g, or c
  misc_feature (689): n equals a,t,g, or c
  misc_feature (690): n equals a,t,g, or c
  misc_feature (691): n equals a,t,g, or c
  misc_feature (692): n equals a,t,g, or c
  misc_feature (693): n equals a,t,g, or c
  misc_feature (694): n equals a,t,g, or c
  misc_feature (695): n equals a,t,g, or c
  misc_feature (696): n equals a,t,g, or c
  misc_feature (697): n equals a,t,g, or c
  misc_feature (698): n equals a,t,g, or c
  misc_feature (699): n equals a,t,g, or c
  misc_feature (700): n equals a,t,g, or c
  misc_feature (701): n equals a,t,g, or c
  misc_feature (702): n equals a,t,g, or c
  misc_feature (703): n equals a,t,g, or c
  misc_feature (704): n equals a,t,g, or c
  misc_feature (705): n equals a,t,g, or c
  misc_feature (706): n equals a,t,g, or c
  misc_feature (707): n equals a,t,g, or c
  misc_feature (708): n equals a,t,g, or c
  misc_feature (709): n equals a,t,g, or c
  misc_feature (710): n equals a,t,g, or c
  misc_feature (711): n equals a,t,g, or c
  misc_feature (712): n equals a,t,g, or c
  misc_feature (713): n equals a,t,g, or c
  misc_feature (714): n equals a,t,g, or c
  misc_feature (715): n equals a,t,g, or c
  misc_feature (716): n equals a,t,g, or c
  misc_feature (717): n equals a,t,g, or c
  misc_feature (718): n equals a,t,g, or c
  misc_feature (719): n equals a,t,g, or c
  misc_feature (720): n equals a,t,g, or c
  misc_feature (721): n equals a,t,g, or c
  misc_feature (722): n equals a,t,g, or c
  misc_feature (723): n equals a,t,g, or c
  misc_feature (724): n equals a,t,g, or c
  misc_feature (725): n equals a,t,g, or c
  misc_feature (726): n equals a,t,g, or c
  misc_feature (727): n equals a,t,g, or c
  misc_feature (728): n equals a,t,g, or c
  misc_feature (729): n equals a,t,g, or c
  misc_feature (730): n equals a,t,g, or c
  misc_feature (731): n equals a,t,g, or c
  misc_feature (732): n equals a,t,g, or c
  misc_feature (733): n equals a,t,g, or c
  misc_feature (734): n equals a,t,g, or c
  misc_feature (735): n equals a,t,g, or c
  misc_feature (736): n equals a,t,g, or c
  misc_feature (737): n equals a,t,g, or c
  misc_feature (738): n equals a,t,g, or c
  misc_feature (739): n equals a,t,g, or c
  misc_feature (740): n equals a,t,g, or c
  misc_feature (741): n equals a,t,g, or c
  misc_feature (742): n equals a,t,g, or c
  misc_feature (743): n equals a,t,g, or c
  misc_feature (744): n equals a,t,g, or c
  misc_feature (745): n equals a,t,g, or c
  misc_feature (746): n equals a,t,g, or c
  misc_feature (747): n equals a,t,g, or c
  misc_feature (748): n equals a,t,g, or c
  misc_feature (749): n equals a,t,g, or c
  misc_feature (750): n equals a,t,g, or c
  misc_feature (751): n equals a,t,g, or c
  misc_feature (752): n equals a,t,g, or c
  misc_feature (753): n equals a,t,g, or c
  misc_feature (754): n equals a,t,g, or c
  misc_feature (755): n equals a,t,g, or c
  misc_feature (756): n equals a,t,g, or c
  misc_feature (757): n equals a,t,g, or c
  misc_feature (758): n equals a,t,g, or c
  misc_feature (759): n equals a,t,g, or c
  misc_feature (760): n equals a,t,g, or c
  misc_feature (761): n equals a,t,g, or c
  misc_feature (762): n equals a,t,g, or c
  misc_feature (763): n equals a,t,g, or c
  misc_feature (764): n equals a,t,g, or c
  misc_feature (765): n equals a,t,g, or c
  misc_feature (766): n equals a,t,g, or c
  misc_feature (767): n equals a,t,g, or c
  misc_feature (768): n equals a,t,g, or c
  misc_feature (769): n equals a,t,g, or c
  misc_feature (770): n equals a,t,g, or c
  misc_feature (771): n equals a,t,g, or c
  misc_feature (772): n equals a,t,g, or c
  misc_feature (773): n equals a,t,g, or c
  misc_feature (774): n equals a,t,g, or c
  misc_feature (775): n equals a,t,g, or c
  misc_feature (776): n equals a,t,g, or c
  misc_feature (777): n equals a,t,g, or c
  misc_feature (778): n equals a,t,g, or c
  misc_feature (779): n equals a,t,g, or c
  misc_feature (780): n equals a,t,g, or c
  misc_feature (781): n equals a,t,g, or c
  misc_feature (782): n equals a,t,g, or c
  misc_feature (783): n equals a,t,g, or c
  misc_feature (784): n equals a,t,g, or c
  misc_feature (785): n equals a,t,g, or c
  misc_feature (786): n equals a,t,g, or c
  misc_feature (787): n equals a,t,g, or c
  misc_feature (788): n equals a,t,g, or c
  misc_feature (789): n equals a,t,g, or c
  misc_feature (790): n equals a,t,g, or c
  misc_feature (791): n equals a,t,g, or c
  misc_feature (792): n equals a,t,g, or c
  misc_feature (793): n equals a,t,g, or c
  misc_feature (794): n equals a,t,g, or c
  misc_feature (795): n equals a,t,g, or c
  misc_feature (796): n equals a,t,g, or c
  misc_feature (797): n equals a,t,g, or c
  misc_feature (798): n equals a,t,g, or c
  misc_feature (799): n equals a,t,g, or c
  misc_feature (800): n equals a,t,g, or c
  misc_feature (801): n equals a,t,g, or c
  misc_feature (802): n equals a,t,g, or c
  misc_feature (803): n equals a,t,g, or c
  misc_feature (804): n equals a,t,g, or c
  misc_feature (805): n equals a,t,g, or c
  misc_feature (806): n equals a,t,g, or c
  misc_feature (807): n equals a,t,g, or c
  misc_feature (808): n equals a,t,g, or c
  misc_feature (809): n equals a,t,g, or c
  misc_feature (810): n equals a,t,g, or c
  misc_feature (811): n equals a,t,g, or c
  misc_feature (812): n equals a,t,g, or c
  misc_feature (813): n equals a,t,g, or c
  misc_feature (814): n equals a,t,g, or c
  misc_feature (815): n equals a,t,g, or c
  misc_feature (816): n equals a,t,g, or c
  misc_feature (817): n equals a,t,g, or c
  misc_feature (818): n equals a,t,g, or c
  misc_feature (819): n equals a,t,g, or c
  misc_feature (820): n equals a,t,g, or c
  misc_feature (821): n equals a,t,g, or c
  misc_feature (822): n equals a,t,g, or c
  misc_feature (823): n equals a,t,g, or c
  misc_feature (824): n equals a,t,g, or c
  misc_feature (825): n equals a,t,g, or c
  misc_feature (826): n equals a,t,g, or c
  misc_feature (827): n equals a,t,g, or c
  misc_feature (828): n equals a,t,g, or c
  misc_feature (829): n equals a,t,g, or c
  misc_feature (830): n equals a,t,g, or c
  misc_feature (831): n equals a,t,g, or c
  misc_feature (832): n equals a,t,g, or c
  misc_feature (833): n equals a,t,g, or c
  misc_feature (834): n equals a,t,g, or c
  misc_feature (835): n equals a,t,g, or c
  misc_feature (836): n equals a,t,g, or c
  misc_feature (837): n equals a,t,g, or c
  misc_feature (838): n equals a,t,g, or c
  misc_feature (839): n equals a,t,g, or c
  misc_feature (840): n equals a,t,g, or c
  misc_feature (841): n equals a,t,g, or c
  misc_feature (842): n equals a,t,g, or c
  misc_feature (843): n equals a,t,g, or c
  misc_feature (844): n equals a,t,g, or c
  misc_feature (845): n equals a,t,g, or c
  misc_feature (846): n equals a,t,g, or c
  misc_feature (847): n equals a,t,g, or c
  misc_feature (848): n equals a,t,g, or c
  misc_feature (849): n equals a,t,g, or c
  misc_feature (850): n equals a,t,g, or c
  misc_feature (851): n equals a,t,g, or c
  misc_feature (852): n equals a,t,g, or c
  misc_feature (853): n equals a,t,g, or c
  misc_feature (854): n equals a,t,g, or c
  misc_feature (855): n equals a,t,g, or c
  misc_feature (856): n equals a,t,g, or c
  misc_feature (857): n equals a,t,g, or c
  misc_feature (858): n equals a,t,g, or c
  misc_feature (859): n equals a,t,g, or c
  misc_feature (860): n equals a,t,g, or c
  misc_feature (861): n equals a,t,g, or c
  misc_feature (862): n equals a,t,g, or c
  misc_feature (863): n equals a,t,g, or c
  misc_feature (864): n equals a,t,g, or c
  misc_feature (865): n equals a,t,g, or c
  misc_feature (866): n equals a,t,g, or c
  misc_feature (867): n equals a,t,g, or c
  misc_feature (868): n equals a,t,g, or c
  misc_feature (869): n equals a,t,g, or c
  misc_feature (870): n equals a,t,g, or c
  misc_feature (871): n equals a,t,g, or c
  misc_feature (872): n equals a,t,g, or c
  misc_feature (873): n equals a,t,g, or c
  misc_feature (874): n equals a,t,g, or c
  misc_feature (875): n equals a,t,g, or c
  misc_feature (876): n equals a,t,g, or c
  misc_feature (877): n equals a,t,g, or c
  misc_feature (878): n equals a,t,g, or c
  misc_feature (879): n equals a,t,g, or c
  misc_feature (880): n equals a,t,g, or c
  misc_feature (881): n equals a,t,g, or c
  misc_feature (882): n equals a,t,g, or c
  misc_feature (883): n equals a,t,g, or c
  misc_feature (884): n equals a,t,g, or c
  misc_feature (885): n equals a,t,g, or c
  misc_feature (886): n equals a,t,g, or c
  misc_feature (887): n equals a,t,g, or c
  misc_feature (888): n equals a,t,g, or c
  misc_feature (889): n equals a,t,g, or c
  misc_feature (890): n equals a,t,g, or c
  misc_feature (891): n equals a,t,g, or c
  misc_feature (892): n equals a,t,g, or c
  misc_feature (893): n equals a,t,g, or c
  misc_feature (894): n equals a,t,g, or c
  misc_feature (895): n equals a,t,g, or c
  misc_feature (896): n equals a,t,g, or c
  misc_feature (897): n equals a,t,g, or c
  misc_feature (898): n equals a,t,g, or c
  misc_feature (899): n equals a,t,g, or c
  misc_feature (900): n equals a,t,g, or c
  misc_feature (901): n equals a,t,g, or c
  misc_feature (902): n equals a,t,g, or c
  misc_feature (903): n equals a,t,g, or c
  misc_feature (904): n equals a,t,g, or c
  misc_feature (905): n equals a,t,g, or c
  misc_feature (906): n equals a,t,g, or c
  misc_feature (907): n equals a,t,g, or c
  misc_feature (908): n equals a,t,g, or c
  misc_feature (909): n equals a,t,g, or c
  misc_feature (910): n equals a,t,g, or c
  misc_feature (911): n equals a,t,g, or c
  misc_feature (912): n equals a,t,g, or c
  misc_feature (913): n equals a,t,g, or c
  misc_feature (914): n equals a,t,g, or c
  misc_feature (915): n equals a,t,g, or c
  misc_feature (916): n equals a,t,g, or c
  misc_feature (917): n equals a,t,g, or c
  misc_feature (918): n equals a,t,g, or c
  misc_feature (919): n equals a,t,g, or c
  misc_feature (920): n equals a,t,g, or c
  misc_feature (921): n equals a,t,g, or c
  misc_feature (922): n equals a,t,g, or c
  misc_feature (923): n equals a,t,g, or c
  misc_feature (924): n equals a,t,g, or c
  misc_feature (925): n equals a,t,g, or c
  misc_feature (926): n equals a,t,g, or c
  misc_feature (927): n equals a,t,g, or c
  misc_feature (928): n equals a,t,g, or c
  misc_feature (929): n equals a,t,g, or c
  misc_feature (930): n equals a,t,g, or c
  misc_feature (931): n equals a,t,g, or c
  misc_feature (932): n equals a,t,g, or c
  misc_feature (933): n equals a,t,g, or c
  misc_feature (934): n equals a,t,g, or c
  misc_feature (935): n equals a,t,g, or c
  misc_feature (936): n equals a,t,g, or c
  misc_feature (937): n equals a,t,g, or c
  misc_feature (938): n equals a,t,g, or c
  misc_feature (939): n equals a,t,g, or c
  misc_feature (940): n equals a,t,g, or c
  misc_feature (941): n equals a,t,g, or c
  misc_feature (942): n equals a,t,g, or c
  misc_feature (943): n equals a,t,g, or c
  misc_feature (944): n equals a,t,g, or c
  misc_feature (945): n equals a,t,g, or c
  misc_feature (946): n equals a,t,g, or c
  misc_feature (947): n equals a,t,g, or c
  misc_feature (948): n equals a,t,g, or c
  misc_feature (949): n equals a,t,g, or c
  misc_feature (950): n equals a,t,g, or c
  misc_feature (951): n equals a,t,g, or c
  misc_feature (952): n equals a,t,g, or c
  misc_feature (953): n equals a,t,g, or c
  misc_feature (954): n equals a,t,g, or c
  misc_feature (955): n equals a,t,g, or c
  misc_feature (956): n equals a,t,g, or c
  misc_feature (957): n equals a,t,g, or c
  misc_feature (958): n equals a,t,g, or c
  misc_feature (959): n equals a,t,g, or c
  misc_feature (960): n equals a,t,g, or c
  misc_feature (961): n equals a,t,g, or c
  misc_feature (962): n equals a,t,g, or c
  misc_feature (963): n equals a,t,g, or c
  misc_feature (964): n equals a,t,g, or c
  misc_feature (965): n equals a,t,g, or c
  misc_feature (966): n equals a,t,g, or c
  misc_feature (967): n equals a,t,g, or c
  misc_feature (968): n equals a,t,g, or c
  misc_feature (969): n equals a,t,g, or c
  misc_feature (970): n equals a,t,g, or c
  misc_feature (971): n equals a,t,g, or c
  misc_feature (972): n equals a,t,g, or c
  misc_feature (973): n equals a,t,g, or c
  misc_feature (974): n equals a,t,g, or c
  misc_feature (975): n equals a,t,g, or c
  misc_feature (976): n equals a,t,g, or c
  misc_feature (977): n equals a,t,g, or c
  misc_feature (978): n equals a,t,g, or c
  misc_feature (979): n equals a,t,g, or c
  misc_feature (980): n equals a,t,g, or c
  misc_feature (981): n equals a,t,g, or c
  misc_feature (982): n equals a,t,g, or c
  misc_feature (983): n equals a,t,g, or c
  misc_feature (984): n equals a,t,g, or c
  misc_feature (985): n equals a,t,g, or c
  misc_feature (986): n equals a,t,g, or c
  misc_feature (987): n equals a,t,g, or c
  misc_feature (988): n equals a,t,g, or c
  misc_feature (989): n equals a,t,g, or c
  misc_feature (990): n equals a,t,g, or c
  misc_feature (991): n equals a,t,g, or c
  misc_feature (992): n equals a,t,g, or c
  misc_feature (993): n equals a,t,g, or c
  misc_feature (994): n equals a,t,g, or c
  misc_feature (995): n equals a,t,g, or c
  misc_feature (996): n equals a,t,g, or c
  misc_feature (997): n equals a,t,g, or c
  misc_feature (998): n equals a,t,g, or c
  misc_feature (999): n equals a,t,g, or c
  misc_feature (1000): n equals a,t,g, or c
  misc_feature (1001): n equals a,t,g, or c
  misc_feature (1002): n equals a,t,g, or c
  misc_feature (1003): n equals a,t,g, or c
  misc_feature (1004): n equals a,t,g, or c
  misc_feature (1005): n equals a,t,g, or c
  misc_feature (1006): n equals a,t,g, or c
  misc_feature (1007): n equals a,t,g, or c
  misc_feature (1008): n equals a,t,g, or c
  misc_feature (1009): n equals a,t,g, or c
  misc_feature (1010): n equals a,t,g, or c
  misc_feature (1011): n equals a,t,g, or c
  misc_feature (1012): n equals a,t,g, or c
  misc_feature (1013): n equals a,t,g, or c
  misc_feature (1014): n equals a,t,g, or c
  misc_feature (1015): n equals a,t,g, or c
  misc_feature (1016): n equals a,t,g, or c
  misc_feature (1017): n equals a,t,g, or c
  misc_feature (1018): n equals a,t,g, or c
  misc_feature (1019): n equals a,t,g, or c
  misc_feature (1020): n equals a,t,g, or c
  misc_feature (1021): n equals a,t,g, or c
  misc_feature (1022): n equals a,t,g, or c
  misc_feature (1023): n equals a,t,g, or c
  misc_feature (1024): n equals a,t,g, or c
  misc_feature (1025): n equals a,t,g, or c
  misc_feature (1026): n equals a,t,g, or c
  misc_feature (1027): n equals a,t,g, or c
  misc_feature (1028): n equals a,t,g, or c
  misc_feature (1029): n equals a,t,g, or c
  misc_feature (1030): n equals a,t,g, or c
  misc_feature (1031): n equals a,t,g, or c
  misc_feature (1032): n equals a,t,g, or c
  misc_feature (1033): n equals a,t,g, or c
  misc_feature (1034): n equals a,t,g, or c
  misc_feature (1035): n equals a,t,g, or c
  misc_feature (1036): n equals a,t,g, or c
  misc_feature (1037): n equals a,t,g, or c
  misc_feature (1038): n equals a,t,g, or c
  misc_feature (1039): n equals a,t,g, or c
  misc_feature (1040): n equals a,t,g, or c
  misc_feature (1041): n equals a,t,g, or c
  misc_feature (1042): n equals a,t,g, or c
  misc_feature (1043): n equals a,t,g, or c
  misc_feature (1044): n equals a,t,g, or c
  misc_feature (1045): n equals a,t,g, or c
  misc_feature (1046): n equals a,t,g, or c
  misc_feature (1047): n equals a,t,g, or c
  misc_feature (1048): n equals a,t,g, or c
  misc_feature (1049): n equals a,t,g, or c
  misc_feature (1050): n equals a,t,g, or c
  misc_feature (1051): n equals a,t,g, or c
  misc_feature (1052): n equals a,t,g, or c
  misc_feature (1053): n equals a,t,g, or c
  misc_feature (1054): n equals a,t,g, or c
  misc_feature (1055): n equals a,t,g, or c
  misc_feature (1056): n equals a,t,g, or c
  misc_feature (1057): n equals a,t,g, or c
  misc_feature (1058): n equals a,t,g, or c
  misc_feature (1059): n equals a,t,g, or c
  misc_feature (1060): n equals a,t,g, or c
  misc_feature (1061): n equals a,t,g, or c
  misc_feature (1062): n equals a,t,g, or c
  misc_feature (1063): n equals a,t,g, or c
  misc_feature (1064): n equals a,t,g, or c
  misc_feature (1065): n equals a,t,g, or c
  misc_feature (1066): n equals a,t,g, or c
  misc_feature (1067): n equals a,t,g, or c
  misc_feature (1068): n equals a,t,g, or c
  misc_feature (1069): n equals a,t,g, or c
  misc_feature (1070): n equals a,t,g, or c
  misc_feature (1071): n equals a,t,g, or c
  misc_feature (1072): n equals a,t,g, or c
  misc_feature (1073): n equals a,t,g, or c
  misc_feature (1074): n equals a,t,g, or c
  misc_feature (1075): n equals a,t,g, or c
  misc_feature (1076): n equals a,t,g, or c
  misc_feature (1077): n equals a,t,g, or c
  misc_feature (1078): n equals a,t,g, or c
  misc_feature (1079): n equals a,t,g, or c
  misc_feature (1080): n equals a,t,g, or c
  misc_feature (1081): n equals a,t,g, or c
  misc_feature (1082): n equals a,t,g, or c
  misc_feature (1083): n equals a,t,g, or c
  misc_feature (1084): n equals a,t,g, or c
  misc_feature (1085): n equals a,t,g, or c
  misc_feature (1086): n equals a,t,g, or c
  misc_feature (1087): n equals a,t,g, or c
  misc_feature (1088): n equals a,t,g, or c
  misc_feature (1089): n equals a,t,g, or c
  misc_feature (1090): n equals a,t,g, or c
  misc_feature (1091): n equals a,t,g, or c
  misc_feature (1092): n equals a,t,g, or c
  misc_feature (1093): n equals a,t,g, or c
  misc_feature (1094): n equals a,t,g, or c
  misc_feature (1095): n equals a,t,g, or c
  misc_feature (1096): n equals a,t,g, or c
  misc_feature (1097): n equals a,t,g, or c
  misc_feature (1098): n equals a,t,g, or c
  misc_feature (1099): n equals a,t,g, or c
  misc_feature (1100): n equals a,t,g, or c
  misc_feature (1101): n equals a,t,g, or c
  misc_feature (1102): n equals a,t,g, or c
  misc_feature (1103): n equals a,t,g, or c
  misc_feature (1104): n equals a,t,g, or c
  misc_feature (1105): n equals a,t,g, or c
  misc_feature (1106): n equals a,t,g, or c
  misc_feature (1107): n equals a,t,g, or c
  misc_feature (1108): n equals a,t,g, or c
  misc_feature (1109): n equals a,t,g, or c
  misc_feature (1110): n equals a,t,g, or c
  misc_feature (1111): n equals a,t,g, or c
  misc_feature (1112): n equals a,t,g, or c
  misc_feature (1113): n equals a,t,g, or c
  misc_feature (1114): n equals a,t,g, or c
  misc_feature (1115): n equals a,t,g, or c
  misc_feature (1116): n equals a,t,g, or c
  misc_feature (1117): n equals a,t,g, or c
  misc_feature (1118): n equals a,t,g, or c
  misc_feature (1119): n equals a,t,g, or c
  misc_feature (1120): n equals a,t,g, or c
  misc_feature (1121): n equals a,t,g, or c
  misc_feature (1122): n equals a,t,g, or c
  misc_feature (1123): n equals a,t,g, or c
  misc_feature (1124): n equals a,t,g, or c
  misc_feature (1125): n equals a,t,g, or c
  misc_feature (1126): n equals a,t,g, or c
  misc_feature (1127): n equals a,t,g, or c
  misc_feature (1128): n equals a,t,g, or c
  misc_feature (1129): n equals a,t,g, or c
  misc_feature (1130): n equals a,t,g, or c
  misc_feature (1131): n equals a,t,g, or c
  misc_feature (1132): n equals a,t,g, or c
  misc_feature (1133): n equals a,t,g, or c
  misc_feature (1134): n equals a,t,g, or c
  misc_feature (1135): n equals a,t,g, or c
  misc_feature (1136): n equals a,t,g, or c
  misc_feature (1137): n equals a,t,g, or c
  misc_feature (1138): n equals a,t,g, or c
  misc_feature (1139): n equals a,t,g, or c
  misc_feature (1140): n equals a,t,g, or c
  misc_feature (1141): n equals a,t,g, or c
  misc_feature (1142): n equals a,t,g, or c
  misc_feature (1143): n equals a,t,g, or c
  misc_feature (1144): n equals a,t,g, or c
  misc_feature (1145): n equals a,t,g, or c
  misc_feature (1146): n equals a,t,g, or c
  misc_feature (4785): n equals a,t,g, or c
  misc_feature (4786): n equals a,t,g, or c
  misc_feature (4787): n equals a,t,g, or c
  misc_feature (4788): n equals a,t,g, or c
  misc_feature (4789): n equals a,t,g, or c
  misc_feature (4790): n equals a,t,g, or c
  misc_feature (4791): n equals a,t,g, or c
  misc_feature (4792): n equals a,t,g, or c
  misc_feature (4793): n equals a,t,g, or c
  misc_feature (4794): n equals a,t,g, or c
  misc_feature (4795): n equals a,t,g, or c
  misc_feature (4796): n equals a,t,g, or c
  misc_feature (4797): n equals a,t,g, or c
  misc_feature (4798): n equals a,t,g, or c
  misc_feature (4799): n equals a,t,g, or c
  misc_feature (4800): n equals a,t,g, or c
  misc_feature (4801): n equals a,t,g, or c
  misc_feature (4802): n equals a,t,g, or c
  misc_feature (4803): n equals a,t,g, or c
  misc_feature (4804): n equals a,t,g, or c
  misc_feature (4805): n equals a,t,g, or c
  misc_feature (4806): n equals a,t,g, or c
  misc_feature (4807): n equals a,t,g, or c
  misc_feature (4808): n equals a,t,g, or c
  misc_feature (4809): n equals a,t,g, or c
  misc_feature (4810): n equals a,t,g, or c
  misc_feature (4811): n equals a,t,g, or c
  misc_feature (4812): n equals a,t,g, or c
  misc_feature (4813): n equals a,t,g, or c
  misc_feature (4814): n equals a,t,g, or c
  misc_feature (4815): n equals a,t,g, or c
  misc_feature (4816): n equals a,t,g, or c
  misc_feature (4817): n equals a,t,g, or c
  misc_feature (4818): n equals a,t,g, or c
  misc_feature (4819): n equals a,t,g, or c
  misc_feature (4820): n equals a,t,g, or c
  misc_feature (4821): n equals a,t,g, or c
  misc_feature (4822): n equals a,t,g, or c
  misc_feature (4823): n equals a,t,g, or c
  misc_feature (4824): n equals a,t,g, or c
  misc_feature (4825): n equals a,t,g, or c
  misc_feature (4826): n equals a,t,g, or c
  misc_feature (4827): n equals a,t,g, or c
  misc_feature (4828): n equals a,t,g, or c
  misc_feature (4829): n equals a,t,g, or c
  misc_feature (4830): n equals a,t,g, or c
  misc_feature (4831): n equals a,t,g, or c
  misc_feature (4832): n equals a,t,g, or c
  misc_feature (4833): n equals a,t,g, or c
  misc_feature (4834): n equals a,t,g, or c
  misc_feature (4835): n equals a,t,g, or c
  misc_feature (4836): n equals a,t,g, or c
  misc_feature (4837): n equals a,t,g, or c
  misc_feature (4838): n equals a,t,g, or c
  misc_feature (4839): n equals a,t,g, or c
  misc_feature (4840): n equals a,t,g, or c
  misc_feature (4841): n equals a,t,g, or c
  misc_feature (4842): n equals a,t,g, or c
  misc_feature (4843): n equals a,t,g, or c
  misc_feature (4844): n equals a,t,g, or c
  misc_feature (4845): n equals a,t,g, or c
  misc_feature (4846): n equals a,t,g, or c
  misc_feature (4847): n equals a,t,g, or c
  misc_feature (4848): n equals a,t,g, or c
  misc_feature (4849): n equals a,t,g, or c
  misc_feature (4850): n equals a,t,g, or c
  misc_feature (4851): n equals a,t,g, or c
  misc_feature (4852): n equals a,t,g, or c
  misc_feature (4853): n equals a,t,g, or c
  misc_feature (4854): n equals a,t,g, or c
  misc_feature (4855): n equals a,t,g, or c
  misc_feature (4856): n equals a,t,g, or c
  misc_feature (4857): n equals a,t,g, or c
  misc_feature (4858): n equals a,t,g, or c
  misc_feature (4859): n equals a,t,g, or c
  misc_feature (4860): n equals a,t,g, or c
  misc_feature (4861): n equals a,t,g, or c
  misc_feature (4862): n equals a,t,g, or c
  misc_feature (4863): n equals a,t,g, or c
  misc_feature (4864): n equals a,t,g, or c
  misc_feature (4865): n equals a,t,g, or c
  misc_feature (4866): n equals a,t,g, or c
  misc_feature (4867): n equals a,t,g, or c
  misc_feature (4868): n equals a,t,g, or c
  misc_feature (4869): n equals a,t,g, or c
  misc_feature (4870): n equals a,t,g, or c
  misc_feature (4871): n equals a,t,g, or c
  misc_feature (4872): n equals a,t,g, or c
  misc_feature (4873): n equals a,t,g, or c
  misc_feature (4874): n equals a,t,g, or c
  misc_feature (4875): n equals a,t,g, or c
  misc_feature (4876): n equals a,t,g, or c
  misc_feature (4877): n equals a,t,g, or c
  misc_feature (4878): n equals a,t,g, or c
  misc_feature (4879): n equals a,t,g, or c
  misc_feature (4880): n equals a,t,g, or c
  misc_feature (4881): n equals a,t,g, or c
  misc_feature (4882): n equals a,t,g, or c
  misc_feature (4883): n equals a,t,g, or c
  misc_feature (4884): n equals a,t,g, or c
  misc_feature (4885): n equals a,t,g, or c
  misc_feature (4886): n equals a,t,g, or c
  misc_feature (4887): n equals a,t,g, or c
  misc_feature (4888): n equals a,t,g, or c
  misc_feature (4889): n equals a,t,g, or c
  misc_feature (4890): n equals a,t,g, or c
  misc_feature (4891): n equals a,t,g, or c
  misc_feature (4892): n equals a,t,g, or c
  misc_feature (4893): n equals a,t,g, or c
  misc_feature (4894): n equals a,t,g, or c
  misc_feature (4895): n equals a,t,g, or c
  misc_feature (4896): n equals a,t,g, or c
  misc_feature (4897): n equals a,t,g, or c
  misc_feature (4898): n equals a,t,g, or c
  misc_feature (4899): n equals a,t,g, or c
  misc_feature (4900): n equals a,t,g, or c
  misc_feature (4901): n equals a,t,g, or c
  misc_feature (4902): n equals a,t,g, or c
  misc_feature (4903): n equals a,t,g, or c
  misc_feature (4904): n equals a,t,g, or c
  misc_feature (4905): n equals a,t,g, or c
  misc_feature (4906): n equals a,t,g, or c
  misc_feature (4907): n equals a,t,g, or c
  misc_feature (4908): n equals a,t,g, or c
  misc_feature (4909): n equals a,t,g, or c
  misc_feature (4910): n equals a,t,g, or c
  misc_feature (4911): n equals a,t,g, or c
  misc_feature (4912): n equals a,t,g, or c
  misc_feature (4913): n equals a,t,g, or c
  misc_feature (4914): n equals a,t,g, or c
  misc_feature (4915): n equals a,t,g, or c
  misc_feature (4916): n equals a,t,g, or c
  misc_feature (4917): n equals a,t,g, or c
  misc_feature (4918): n equals a,t,g, or c
  misc_feature (4919): n equals a,t,g, or c
  misc_feature (4920): n equals a,t,g, or c
  misc_feature (4921): n equals a,t,g, or c
  misc_feature (4922): n equals a,t,g, or c
  misc_feature (4923): n equals a,t,g, or c
  misc_feature (4924): n equals a,t,g, or c
  misc_feature (4925): n equals a,t,g, or c
  misc_feature (4926): n equals a,t,g, or c
  misc_feature (4927): n equals a,t,g, or c
  misc_feature (4928): n equals a,t,g, or c
  misc_feature (4929): n equals a,t,g, or c
  misc_feature (4930): n equals a,t,g, or c
  misc_feature (4931): n equals a,t,g, or c
  misc_feature (4932): n equals a,t,g, or c
  misc_feature (4933): n equals a,t,g, or c
  misc_feature (4934): n equals a,t,g, or c
  misc_feature (4935): n equals a,t,g, or c
  misc_feature (4936): n equals a,t,g, or c
  misc_feature (4937): n equals a,t,g, or c
  misc_feature (4938): n equals a,t,g, or c
  misc_feature (4939): n equals a,t,g, or c
  misc_feature (4940): n equals a,t,g, or c
  misc_feature (4941): n equals a,t,g, or c
  misc_feature (4942): n equals a,t,g, or c
  misc_feature (4943): n equals a,t,g, or c
  misc_feature (4944): n equals a,t,g, or c
  misc_feature (4945): n equals a,t,g, or c
  misc_feature (4946): n equals a,t,g, or c
  misc_feature (4947): n equals a,t,g, or c
  misc_feature (4948): n equals a,t,g, or c
  misc_feature (4949): n equals a,t,g, or c
  misc_feature (4950): n equals a,t,g, or c
  misc_feature (4951): n equals a,t,g, or c
  misc_feature (4952): n equals a,t,g, or c
  misc_feature (4953): n equals a,t,g, or c
  misc_feature (4954): n equals a,t,g, or c
  misc_feature (4955): n equals a,t,g, or c
  misc_feature (4956): n equals a,t,g, or c
  misc_feature (4957): n equals a,t,g, or c
  misc_feature (4958): n equals a,t,g, or c
  misc_feature (4959): n equals a,t,g, or c
  misc_feature (4960): n equals a,t,g, or c
  misc_feature (4961): n equals a,t,g, or c
  misc_feature (4962): n equals a,t,g, or c
  misc_feature (4963): n equals a,t,g, or c
  misc_feature (4964): n equals a,t,g, or c
  misc_feature (4965): n equals a,t,g, or c
  misc_feature (4966): n equals a,t,g, or c
  misc_feature (4967): n equals a,t,g, or c
  misc_feature (4968): n equals a,t,g, or c
  misc_feature (4969): n equals a,t,g, or c
  misc_feature (4970): n equals a,t,g, or c
  misc_feature (4971): n equals a,t,g, or c
  misc_feature (4972): n equals a,t,g, or c
  misc_feature (4973): n equals a,t,g, or c
  misc_feature (4974): n equals a,t,g, or c
  misc_feature (4975): n equals a,t,g, or c
  misc_feature (4976): n equals a,t,g, or c
  misc_feature (4977): n equals a,t,g, or c
  misc_feature (4978): n equals a,t,g, or c
  misc_feature (4979): n equals a,t,g, or c
  misc_feature (4980): n equals a,t,g, or c
  misc_feature (4981): n equals a,t,g, or c
  misc_feature (4982): n equals a,t,g, or c
  misc_feature (4983): n equals a,t,g, or c
  misc_feature (4984): n equals a,t,g, or c
  misc_feature (4985): n equals a,t,g, or c
  misc_feature (4986): n equals a,t,g, or c
  misc_feature (4987): n equals a,t,g, or c
  misc_feature (4988): n equals a,t,g, or c
  misc_feature (4989): n equals a,t,g, or c
  misc_feature (4990): n equals a,t,g, or c
  misc_feature (4991): n equals a,t,g, or c
  misc_feature (4992): n equals a,t,g, or c
  misc_feature (4993): n equals a,t,g, or c
  misc_feature (4994): n equals a,t,g, or c
  misc_feature (4995): n equals a,t,g, or c
  misc_feature (4996): n equals a,t,g, or c
  misc_feature (4997): n equals a,t,g, or c
  misc_feature (4998): n equals a,t,g, or c
  misc_feature (4999): n equals a,t,g, or c
  misc_feature (5000): n equals a,t,g, or c
  misc_feature (5001): n equals a,t,g, or c
  misc_feature (5002): n equals a,t,g, or c
  misc_feature (5003): n equals a,t,g, or c
  misc_feature (5004): n equals a,t,g, or c
  misc_feature (5005): n equals a,t,g, or c
  misc_feature (5006): n equals a,t,g, or c
  misc_feature (5007): n equals a,t,g, or c
  misc_feature (5008): n equals a,t,g, or c
  misc_feature (5009): n equals a,t,g, or c
  misc_feature (5010): n equals a,t,g, or c
  misc_feature (5011): n equals a,t,g, or c
  misc_feature (5012): n equals a,t,g, or c
  misc_feature (5013): n equals a,t,g, or c
  misc_feature (5014): n equals a,t,g, or c
  misc_feature (5015): n equals a,t,g, or c
  misc_feature (5016): n equals a,t,g, or c
  misc_feature (5017): n equals a,t,g, or c
  misc_feature (5018): n equals a,t,g, or c
  misc_feature (5019): n equals a,t,g, or c
  misc_feature (5020): n equals a,t,g, or c
  misc_feature (5021): n equals a,t,g, or c
  misc_feature (5022): n equals a,t,g, or c
  misc_feature (5023): n equals a,t,g, or c
  misc_feature (5024): n equals a,t,g, or c
  misc_feature (5025): n equals a,t,g, or c
  misc_feature (5026): n equals a,t,g, or c
  misc_feature (5027): n equals a,t,g, or c
  misc_feature (5028): n equals a,t,g, or c
  misc_feature (5029): n equals a,t,g, or c
  misc_feature (5030): n equals a,t,g, or c
  misc_feature (5031): n equals a,t,g, or c
  misc_feature (5032): n equals a,t,g, or c
  misc_feature (5033): n equals a,t,g, or c
  misc_feature (5034): n equals a,t,g, or c
  misc_feature (5035): n equals a,t,g, or c
  misc_feature (5036): n equals a,t,g, or c
  misc_feature (5037): n equals a,t,g, or c
  misc_feature (5038): n equals a,t,g, or c
  misc_feature (5039): n equals a,t,g, or c
  misc_feature (5040): n equals a,t,g, or c
  misc_feature (5041): n equals a,t,g, or c
  misc_feature (5042): n equals a,t,g, or c
  misc_feature (5043): n equals a,t,g, or c
  misc_feature (5044): n equals a,t,g, or c
  misc_feature (5045): n equals a,t,g, or c
  misc_feature (5046): n equals a,t,g, or c
  misc_feature (5047): n equals a,t,g, or c
  misc_feature (5048): n equals a,t,g, or c
  misc_feature (5049): n equals a,t,g, or c
  misc_feature (5050): n equals a,t,g, or c
  misc_feature (5051): n equals a,t,g, or c
  misc_feature (5052): n equals a,t,g, or c
  misc_feature (5053): n equals a,t,g, or c
  misc_feature (5054): n equals a,t,g, or c
  misc_feature (5055): n equals a,t,g, or c
  misc_feature (5056): n equals a,t,g, or c
  misc_feature (5057): n equals a,t,g, or c
  misc_feature (5058): n equals a,t,g, or c
  misc_feature (5059): n equals a,t,g, or c
  misc_feature (5060): n equals a,t,g, or c
  misc_feature (5061): n equals a,t,g, or c
  misc_feature (5062): n equals a,t,g, or c
  misc_feature (5063): n equals a,t,g, or c
  misc_feature (5064): n equals a,t,g, or c
  misc_feature (5065): n equals a,t,g, or c
  misc_feature (5066): n equals a,t,g, or c
  misc_feature (5067): n equals a,t,g, or c
  misc_feature (5068): n equals a,t,g, or c
  misc_feature (5069): n equals a,t,g, or c
  misc_feature (5070): n equals a,t,g, or c
  misc_feature (5071): n equals a,t,g, or c
  misc_feature (5072): n equals a,t,g, or c
  misc_feature (5073): n equals a,t,g, or c
  misc_feature (5074): n equals a,t,g, or c
  misc_feature (5075): n equals a,t,g, or c
  misc_feature (5076): n equals a,t,g, or c
  misc_feature (5077): n equals a,t,g, or c
  misc_feature (5078): n equals a,t,g, or c
  misc_feature (5079): n equals a,t,g, or c
  misc_feature (5080): n equals a,t,g, or c
  misc_feature (5081): n equals a,t,g, or c
  misc_feature (5082): n equals a,t,g, or c
  misc_feature (5083): n equals a,t,g, or c
  misc_feature (5084): n equals a,t,g, or c
tattattagtgatactcttttttttcttttcttttttgagatgaagtctcactctgttgcccaggctggagtgcaggggcatgatcttggctcactgcaacctccaccacccaggttcaagggattatcctgcctccgcctccctagtagctgggactacaggtgcgtgccgccatgcccagctaattttttttttnnnnnnnnnnnnnnnnnnnnnnnnnnnnnnnnnnnnnnnnnnnnnnnnnnnnnnnnnnnnnnnnnnnnnnnnnnnnnnnnnnnnnnnnnnnnnnnnnnnnnnnnnnnnnnnnnnnnnnnnnnnnnnnnnnnnnnnnnnnnnnnnnnnnnnnnnnnnnnnnnnnnnnnnnnnnnnnnnnnnnnnnnnnnnnnnnnnnnnnnnnnnnnnnnnnnnnnnnnnnnnnnnnnnnnnnnnnnnnnnnnnnnnnnnnnnnnnnnnnnnnnnnnnnnnnnnnnnnnnnnnnnnnnnnnnnnnnnnnnnnnnnnnnnnnnnnnnnnnnnnnnnnnnnnnnnnnnnnnnnnnnnnnnnnnnnnnnnnnnnnnnnnnnnnnnnnnnnnnnnnnnnnnnnnnnnnnnnnnnnnnnnnnnnnnnnnnnnnnnnnnnnnnnnnnnnnnnnnnnnnnnnnnnnnnnnnnnnnnnnnnnnnnnnnnnnnnnnnnnnnnnnnnnnnnnnnnnnnnnnnnnnnnnnnnnnnnnnnnnnnnnnnnnnnnnnnnnnnnnnnnnnnnnnnnnnnnnnnnnnnnnnnnnnnnnnnnnnnnnnnnnnnnnnnnnnnnnnnnnnnnnnnnnnnnnnnnnnnnnnnnnnnnnnnnnnnnnnnnnnnnnnnnnnnnnnnnnnnnnnnnnnnnnnnnnnnnnnnnnnnnnnnnnnnnnnnnnnnnnnnnnnnnnnnnnnnnnnnnnnnnnnnnnnnnnnnnnnnnnnnnnnnnnnnnnnnnnnnnnnnnnnnnnnnnnnnnnnnnnnnnnnnnnnnnnnnnnnnnnnnnnnnnnnnnnnnnnnnnnnnnnnnnnnnnnnnnnnnnnnnnnnnnnnnnnnnnnnnnnnnnnnnnnnnnnnnnnnnnnnnnnnnnnnnnnnnnnnnnnnnnnnnnnnnnnnnnnnnnnnnnnnnnnnnnnnnnnnnnnnnnnnnnnnnnagttcgagaccagtccggtcaccatggtgaataccccgtctctcctaaaaatacaaaaaaattagccgggcatggtggtgtgcgcctgtaatcccagctaccttgaaccggggaggtggaggttatagtgagccgagtttgagccactgcactccagcctgggcgacagagcaagactccgtctgaatacttcagagaaaacccacccaggtaaactcctggcatttcaggtctattatccattgtctttgaatatggaacttgtatttaattttataatgctggtttcatagtatttttagacttttgtaacagaaggaaattcttttttatctgttatagtaatactttaataccttaaattaataatgctttgtccttttaaaagctatttatttatttattttgagcagagtcttgctctgtcacccaggctggagtgcagtggcacgatctcggctccctgcaacctctgcctcccgggttcaagcgattctcctgcttcagcctcccaaatagcttggactacaggcgcctgccatcacgcctggctaatttttgtatttttagtagagatggggtttcaccatgttgaccaggttggtctcgaactcttgacctcaggtgatcctcccgctttggcctcccaaagtgccaggattataggcgtgagccgcagtgcccagcctaaaagctctttagtgtacatttttatgtgattatcataggcataacggggttggttggggttgtttgggggaaagagttgggactttagagtcaaacagaactaaatgaatcctggcttccccattcactacctgtatgcctttttataaattacaaaaattccctgagcctcagccttctcatctgtaaaataggcgtgataatattctcataatgggccaggtgcagtggctcacgcctgtaatcccagcactttgggaggctgaggcgggtggatcacctgaagtcgggagctcgagaccagcctgaccaacatgaagaaaccccatctctattaaaaatacaaaattagccaggcatggtggcgcatgcctgtaattccagctactcaggaggctgagcaggagaatcacttgaacctgggaggtggaggttgcggtgagccgagatcatgccattgcactgcagcctgagtggtggctcacacctgtaatcccagcactttgggaggctgaggcgtgcggctcacaaggtcaggagttccaggccagcctggccaatatggtgaaaccccgtctctactgaaaaaatacaaaattagccgggcgtggtggcaggtgcctgtagtcccagctactcgggaggctgaggcaggagaatcgcttgaacctgggaggcggaggttgcagtgagccgagatcatgccaccgcactcgagcctgggcgacggagcgagactctgtctcaaaacaaacaaaaaattctcatagtgttgctgatgtaaggattaaatgagctaatgtatataaggcacctaacatagtagtatatggtacataaaaggtgcttaaaagctagtaacttattactattatcatcctcatcttacagtgattcattcaacaaatacttcttaagcatctgctgtgttccaggcactgtattagatgctaggaatatagtggtaaagagaaaagccaccatccctaccttcatgaagcttacagtctagtaggaggcacagacaagttgataagtaattataatatattgtgaaaagtgctgtcatagggaaataatagtgcctttgatctctaaaagggacagataaccaaagttggaggccaaaatgattaagtaactggctcaaggctacacagatagtaagtggaggtgccaaaacaaaaacccaccccttcagaactccaagtccagcataatgttcactttaccacgttgcctctgttatagtccataaattgtgtctgggtgggatactgctttccttttacagcactgtcctttatttcaggaattctatgtaacacatgaaatactgaagaaagtggcccccttagaggctaagcttattaaggatcctactatgcagtgtaaaattagattcaggtaatgtatctatgctgatttatttcaagaagtacttagttaatatgaggaaatcttagatatggattttttaaattcttgtaacttctcagaacttaattacaaagtaaatgtgttattcttatttacatttgttatgtaaagaaaccgaggcatgactctgtggctaaaagttgccatgagagtagctctcatctcccattctgtattcagtcttacacaggtatgagaatagttgtgagtacaccaaagtgtgggtcttacatcctatgtgatccatttcattaccagttctttacatgctctgacatagcctttaccctgtatgcaagaaactatatgaactatcttaagtataagggggaaaagcaactgagcccaaaacctgatgccaaataactaaatttttatctttatttcagatttagaggtgaaacgtttccacctttcatcgtgtttaaaatttttcttcatactgatggccatggttacaagtattttagtggaaaaaatgtattaatgccgtcaagtaaggtgacgtttcatgatgtacattttatgttaacttagctttttaacatctacatagtatctgaattgcattcaaattatacagaataagttatttcaccatgaaacagcccaccaggtaggtagtgtgtttttttttaagcaccatgtttcaaagtgtctccacttactagctaaaaaaaaaaaaaaaaaagacatttggagtgaattacttaattaaggctctagaaaatatccatccatttttatgtattaaaatttttatttgttaataatagactaggccaggcgcagtgactcatgcctgtaatgccagcactttgggaggccgaggcgggcagatcacctgaggtcaagagtttgagaccagcctggccaacatggtgaaaccccatctctactaaagatataaaaattagccaggtatggtggcacatgcctgtaatcccagctgctcgggaggttgaggcaggagaatcacttgaacccaggaggtggaggctgcagtgagccaagatcgtaccactgcactccagcctgggcgacacagtgagactctgtctcaaaaaaaaaaaaaagactaaaattggtcagggctcttaaattatgcagaacatttaatttaatgccattttatttgttttaatggaatgttattatttctttgattctggtagcacatttagaaaaaaaatggtctggactatgctattgaaaatgaactttcagccaggcacggtggctcatgcctgtaatcccagcactttgggaggccaaggcgggcgaatcacctgaggtcaggagttcaagaccagcctggccaacatggtgaaaccccgtctctactaaaaatacaaaaattagccaagcgtagtggtgcatgcctgtaatcccagatactcaggaggctgaggcaggagaattgcttgaaccctggaggcagaggttgtggggagctgagatcgcaccactgcaccccagcctgggcaacagagtgagattctatctcannnnnnnnnnnnnnnnnnnnnnnnnnnnnnnnnnnnnnnnnnnnnnnnnnnnnnnnnnnnnnnnnnnnnnnnnnnnnnnnnnnnnnnnnnnnnnnnnnnnnnnnnnnnnnnnnnnnnnnnnnnnnnnnnnnnnnnnnnnnnnnnnnnnnnnnnnnnnnnnnnnnnnnnnnnnnnnnnnnnnnnnnnnnnnnnnnnnnnnnnnnnnnnnnnnnnnnnnnnnnnnnnnnnnnnnnnnnnnnnnnnnnnnnnnnnnnnnnnnnnnnnnnnnnnnnnnnnnnnnnnnnnnnnnnnnnnnnnnnnaata

SEQ ID NO: 341 - DNA, 1130 bp, Homo sapiens
gcccacctcagcctcccaaagtgctaggattatgtttctgtaattgtaatacatttattgtttttagaaactgtctttgctttagtggtaattttcaataaaaatagaaatagcagtggagttattaaaagagcattagttacatttttccctttttcattatcttcaaatattatatatagtaagtttgacctttttaaaatgtatacttgtatcagttttaacacatacatagattcctgtaactgtcaccactataagggtaaagaacagttagttccttcacctttgaagtcaagccccacctctatcccaacacttggcaaccgctgatctttctccgtctcaatagctttgccttttctctttttttttcttatttttttttttgagacagcgtcttgctctgtcgcccgagctggagtgcagtgaggcaatctcggctcactgcaacctccgcctcctgggttcaagcagttctcctgccttagcctccctagtagctgggattataggcacgcaccaccacacccggctgatttttttgtatttttagtagaaatggggtttcaccatgttggccaggctggtctcaaactcttgacctcaagtgatccacctgcctcggcctcccaaagtgctgggattacaggcgtgagccactgtgcccaatcaggactttttttttttaaatttacattcaacttgtcatttttttcttgtatggattgtgccttcagagtcacacctaagagccctttgcctaagcaaaggtcatgaagattttctcatatgtttccttttaaaagtattgtggttggccaggtgccatggcttatgcctgtaatctcagcactttgagaagctgaggtgggcagattacgaggtcaggagatcgagaccatcctggctaatgcggtgaaaccccatctctactaaaaatacaaaaaaaaaaaaaaattagccgggcgtggtggcgggcacctgtagtcccagctacttgagaggttgaggcaggagaatagtgtgaacccgggaggtggagcttgcagtgagccgagatcgcgccactgcactccagcctgggcaacacagtgagactccatctcaaaaaaaaaaaaaaagtatta

SEQ ID NO: 342 - DNA, 228 bp, Homo sapiens
tttttttgagacggagtctcgctctgtcgcccaggctggagtgcagtggcatgatcttggctcactacaagctccgcctcccaggttcacgccattctcctgcctcaacctcccgagtagctgggactacaggctcccgccaccacgcccggctaattttttttgtatttttagtagagatggggtttcaccatgttagccaggatggtctcaatctcctgacctcga

SEQ ID NO: 343 - DNA, 887 bp, Homo sapiens
gacggcatgttattttcatcgcaaagttactgtaagctgggagaagtggcacacacttgtactcccagctactcaggaagcttaaggtgagaagattgcttgagcccaggagttttgagaccaacctgggcaacacagcaagaccccagctcaaacaaagaaaaaaagttattgaattttttatttctatggatcattttttgtagtttcttattcctttcacccttcattcccacttttgatcccatcttttatttatttagttttattaaatgtatatttgtctgataattctgctatctacagttttttgtggacctgactcagcatttctttgtttcttcggattcagactgttggtggcttgtgattttagtgatttttggccgtgaacatgtttcttggacttttgtctgtgggaattctctgtgtactctgtataaattaagttacttcaggtgttttgcattttcttttgccatgcacctggggcctgggtcactacccttctggtaccacttaaaactgaatttttgtcttgggtgctcgtactgatcctgtatgagtacaggtttatacttactgtagaaatatggtgtttgattatggggtattgtcccagatggtgctggagtattaatatgctctctgttaaacttaatgtgttgtccctgtaaaactccaaaattctgaattccagaatactactggccccaaatgtttaagataagggcactgcctgtatttgtttctgcctcccactattttccttagtttaacacaaactcacctttttaaaaaacattttgagagaattcagtattgggaagagtttctaacctgtttctggaaatggaagtccaaagtctgtttctgtaattgttttt

SEQ ID NO: 344 - DNA, 192 bp, Homo sapiens
caagcaattggagacttttttcctgttatttttctaccatttatttctcatttcattatattatggtcagagaatatattttgaatgatttcatttattaatttttaaaaataacattaaaaaattttttaaaatgtgaatataccacatacagtataaagattgtacattctgtttttggacagttttcta

SEQ ID NO: 345 - DNA, 749 bp, Homo sapiens
tctcgccaagacggcgattactctccagacaactcagcccagccgggggacagggtcatttgcttacaggtacttggagcttctgaaattgaggccagaggtggggaaaactgggaagaatgtgtgggttgggagggctgaaagcacatggcagacattcatgatgaaactgagatgaccttttggaaaaagattctgggattgttttaaaaactaacaggagattcatgaggtttagtcttcaggcaactggctttagcctggggcttccacttctgttttccttgcatggcttatgaattaacttggggtttgggctggcaaacctgctccttcttagagcacagatgtcattatctctctggaagtatggccttcttggaaactttgtggttcccatacatataacaagacaagcgtgaaaaaaaaaaagactttaagtgtggttttacttcgtttcttgtttactttattatcttttcttttttatggctttttttttgagaccgagtctcactctgtcactcaggctggagtgcagtggcgaaatctcagctcactgcaacctctgcctcctgggttcaagtgattctcctgcctcagcctcccgagtagctgggactacaggcacgtgccaccacgcccagctaatttttgtatttttagtagagacagggtttcaccatgttggccagcctggtctcaaactcctgacctcaagtgatcctcccacctcagcctcccaaagt

SEQ ID NO: 346 - DNA, 749 bp, Homo sapiens; identical to SEQ ID NO: 345

SEQ ID NO: 347 - DNA, 158 bp, Homo sapiens
ttgtggtggcgggcgcctgtagtcccagctactcgggaggctgaggcaggagaatggcgtgaaccccggaggcggagcttgcagtgagccgagattgcgccaccgcactcccgcctgggcaacagagcgagactccgtctcaaaaaaaaacaaaaaaa

SEQ ID NO: 348 - DNA, 158 bp, Homo sapiens; identical to SEQ ID NO: 347

SEQ ID NO: 349 - DNA, 1999 bp, Homo sapiens
agcagaaaagtgatattgttctcaacatgacagatatttgagttcctacaatgggaaaggcacattaatgatgtttttctttattgcctataattatggttcgatatactcaggaaatctcttgagagagatatctaacccttctcaaagatggcttgaaatgttcagcacttgggagaggttgtcatagttaaaattaattaggaacaagttcatccaatagcaagtctctcaggaataatctaagagtgcattcctttgttttcactctatttgcagacagaatgctagtaacagactaacgtgtaatagaaaaagattgagtatcattagcaacgaatcatagttcagaatctctgcaatctctaatagtgtgattttaaaggcctaatctaagatattttacttgttctttagggaattacaaaaagcactttatatacttgtttgtgagtttggggcttaataaaattgggagcagaaaagataactattgggtactgggcttaatacctatgacacaagtccactgatgtaataaaccttcacatgtacccttgaacctaaaataaaagtttttaaaaaaaaaatcagtactctggaaaccaaaaccaagtaaatggcctgagagagatctggttagttggagaactggtagaaataataaacgaaaagttactccaggcagagttcattaggcaaattcatatgctggagtttcatttttaaagcagttgaatcaacaaggtatgccttcattaattatatttattaggtgtttttaataatctgaggaatcttgtaaattgaatgctgtattacagtaaagtgaactttttttatttagacaaatgatctaacccagttaagcatgcgtagaagaaagcctggaagaaaaaaaacactaaaattttatagtagcatggttgtagtttttatctaccttgttttcaacagtgagaatgtattccttctgtaatcaactgatttagcttttctctatggcatttttgagaatttattcatttaaattgaatacacaataactacgtgtaaagtaaagctttgtgttctaagattgtgtctacacttagttttcatcctaaacatttagagaaattgattagaggaatgataataattatattaattgatttggacaattcagttagaggactaatttataattttttgtgctgctttataacttaacaaagcgtaacctatgaactaagctattattatcatcatttcaaattggaggatactgaggctcagaatttgggacttaggttttatagttagtaaattaaaaaaccaatataaattcatggttaaaaaaattcatacaatgctagtgaagtcttctttctgctttaggccctcatttgctttcccagaggcagccattcttgccagtttcttgtgtgaatttccagtaatagtctgtgtatatgcgaataaatatatatgtatactgtatatgtatattcttttgtgtaagctgtttattgtttcacagtttgttgttatattatttttagcttaactgatttaggagattgctctataacatcacatatagatctcccttattgttttcaaaacctcagggtatttctatatgtgaacttactgttatttattttactggccacctaatgctggacatttattttgttttcaatcttttgttacaactatgctgcagtggatactcttttacatgtttttgtgcacatgtgtgagcatatggattaatttctagtaggtgtaatttttgggccagaggatacttttaatctgcatagatactgctaatttggggtaggcatagtggctcaggcctataattccagtgctttgggaggctgaggcggaaggattgattgaagccaagagttcaaggcctgggtaacatagtgaaatccatctgggacaaaaaaaaaattttttttaattagctgggcatggtggtgtgtgcccgtagtcctagcag

SEQ ID NO: 350 - DNA, 1999 bp, Homo sapiens; identical to SEQ ID NO: 349

SEQ ID NO: 351 - DNA, 511 bp, Homo sapiens
tagagatgatagaatgctagagtaccaaaatgttagttccagttctgctttggccacagctaactgtatgggtttgggttaaatatccaggcctcagttttcttaactttaaaagagactcaacaaacatttgctgagcattcagtatgtgctaggaattactctaggtactgaggatatatatactcatgaacaaaaatagttaacaattctttgaccttggagacaaaacctggaacttatttctgctagaggagtttgaattagctgatctaaggacctttccaacttttaagatcctgttttatagacagtgttctatgatttatagacctagtggactttctctgggttctttagtgctttacagccttaaatgttttctaattcagttgtctttactaggtgttctgtttacttcttgtcaatgagaagtaaaacctgagggagaaagatcttgatttttgcttctgttggtagattagaaaaaaagcatgtaatacttaaaaaa

SEQ ID NO: 352 - DNA, 511 bp, Homo sapiens; identical to SEQ ID NO: 351

SEQ ID NO: 353 - DNA, 210 bp, Homo sapiens
ttagatcatggtttctcagccttggcactttgagattttgggctggagaatttcttgttgtgggaggctgttctgtgcattgtagggtgttttgcagcatccttatccattagacgtaacaccttcaccagttgcagcaatcagaaatatctccagacactgacaaatatttcctagaggattaaattgcctctggtttagaatcactgg

SEQ ID NO: 354 - DNA, 210 bp, Homo sapiens; identical to SEQ ID NO: 353

SEQ ID NO: 355 - DNA, 741 bp, Homo sapiens
gattaacatgtctttctgacctttcccttgaatcatgaatttgaatcctgtggatgaccatatattgaagcctctgatcccagaaaggtaataagctgaaagttgaactgagagaccagataatagaggttaatacccttgggataggaaagaaaacttaaagggtaactgatggggttatccttagcaaaattctatccctatgagatgaccctaagtggagccatctctatgaggattaatccagagattgttgcacacctggcagtgtcaggtctgggaaaacagttgctgatgttttcatggagtgtgaaatactgaaagctgcgggcatcccttggggaccactgacccacactttgaagaaccctcaatgagtctgaaagaggttcagtatctcttgggaaggatgtgttccaggctccaggcctagtcttacatggccagtggggttgaaagactgtgcccctgcaatggtcttttcctaagacagttgaacaaagttccaagtctgtctgtcctattttaaccatctttaagaagcacaaaggggatatgagaaaaacagatgctgaaatgaaaattttaactgatatcttacttatctcacaagtcgtgtaaagaaagaaatgatatggtcgaatattagattagatggtttaatgatgttttgagtgttatatatgagctatgatgagacctagaaaataaagtaaaaataaaaaatatataagccatgaa

SEQ ID NO: 356 - DNA, 1383 bp, Homo sapiens
cctgtgccagcgcgaacccccagcctgtcatgctgacatcatcgatggcagcgtccctgtcttttgctcccccagccctcccaaaggctgagttagcctctatcatctggaatacagtgtggcttctgttttcctaattgaaccctgacttactacctttataatgtttctctctgcttatgtagtttttgatgagtcggaaggtccttgccacgctcacagtgtgtgtactgtgtctcatctatatgcactctctgatgggcaaggaggtatgaattacgactgaagcccttaccacatgccttacacttatagggcctctctcctgtgtggactctgagatgaacacgaagatctgaattctgactgaagtctttaccacactcatcacatttatatggtttctctctggtgtgatctctttgatgtaagtgaaaatatgaactgtaactaaagcactttccacacactttgcatttatatggtttttctcgagtgtgaactcagatgagtgtgaagaacagagctatacgcaaaatcctttccacacacattgcatttgtatggtttctcccctgtgtggactctctggtgaatgtgaaggtgtgtactttggctgaagccctttccacactcatcacacctataaggtttctcccctgtgtgaaacctccagtggacttgaagaacggagcttgaactaaagcacttgccacactcactgcatttgtagggcttctctccagcgtggactctctgatggacaagaaggttggagctctgatcaaagcccttcccacactcttcacttttatagggcttttccctgtgtgtactccctgatgaatacaaagaagtgacctaaatccaaaccctttcccacatgcatcacatttgtagggcatctcccttgtgtggactccatgatggttataaaggaaggagttgcacctgaagcccttgccacattctttacatttgtagggtttgtttcctgaagggactttctgatatctgggaaggtctgagctctgtttgcagcccataggccattcgtggaattcatagggagtctcgccagagtgagttttacaatgaacgataagatcttggctctgactaaagttctttccatactggtcacatttataagatttttctcctaggtgagtgctgtgatggacatgaggatctgtatcatctgcaaagggcaccccacagttattacatgtgaaaggctgtggtaatacatggactgcattatgttgttcaactgttgatttcataccaaagtttttcctgcagttgggatgtctaccagggtcctctcctttacattcttgggactcatgatgatcatgtgaggtccagttgaggctgtca

SEQ ID NO: 357 - DNA, 2222 bp, Homo sapiens
gaaaataatgaatgtggaaaaccccctcagagcattcaccttattcagtttacaagaactcaaacaaaagataaatgctatggatttagtgaccgtattcaatctttttgccatggtacacccctacatatacatgaaaaaattcatggaggaggaaaaacctttgattttaaagaatgtgggcaggttttgaaccccaaaatatcccataatgaacaacagagaattccttttgaagagagtcaatataaatgtagtgaaacctctcatagttcctcccttactcaaaacatgagaaataattctgaagagaaaccttttgaatgtaatcagtgtgggaaatccttcagctggagctcgcatcttgttgcacatcagagaactcacacaggggagaaaccttatgaatgtagtgaatgtggaaaatccttcagccggagctcgcaccttgtttcccatcagagaactcatactggagagaaaccttacaggtgtaatcaatgtgggaaatcctttagccagagttatgtccttgttgtgcatcaaagaactcatactggggagaagccttatgaatgcaatcaatgtggaaagtcattcaggcagagctataaacttattgcacatcaaagaacacataccggagagaagccctatgaatgtaatcaatgtgggaaatcatttatccagagctataaacttattgcacatcaaagaattcatactggggaaaaaccctatgaatgcaatcagtgtgggaaatcctttagtcaaagttataaacttgttgctcatcagagaactcacacaggagaaaaaccctttgaatgtaatcagtgtgggaaatccttcagctggagctctcagcttgttgcacatcaaagaactcacactggagagaaaccgtatgaatgtagtgaatgtggaaaatcttttaaccgcagttctcaccttgttatgcatcagagaattcacactggggaaaaaccgtatgaatgtaatcagtgtgggaaatccttcagccagagttatgttcttgttgtacatcagagaactcatactggagaaaagccctatgaatgcagtcaatgtgggaagtccttcagacagagttcatgccttactcaacatcagagaactcatactggagagaaaccatttgaatgtaatcagtgtggaaaaacatttagcttgagtgctcgacttattgtgcatcaaagaactcatactggagagaaaccctttacatgtattcagtgtggaaaagctttcattaatagctataaacttattaggcatcaggcaactcatactgaagagaaactctatgaatgtaactagtttgtaaatcagctgggatttcttcctttttatttcattcttttaaaaaatttattttaaggtagtacatgtagttggaagaactactataaaaacaatatatgtgggaaaacttccagccctctgttaattgtgtgtctcaaatttgttctggaaaagaaagggggaaagtctatgaacgacttttcaacctggcaattccatatacaatgttaaacttgattcttatgacatattcctatgaaaataataaatactggcacttttccttgcagaaagcactcagacctgaatcagagaaaatcatatgccaaagccaactgccagtgttagacctctttttccataaagagtaaatggaatgctaacactagtgggcttattgagaaaatttaaaggttgctgtagtgtttagaacttaggctggaaaaccatattttagtgcatcattttactacatgatcttccaattagatagcttgtaatctgttccttacagcacttgctgttgttacatgtgaagattttataaattttaggaaagtgtctatgatatatagtgaaaagtgtgggaaaagaatatagaaataatattcacttctaaaaccattatgataaaatatttgtgtatggattagaatagaaagggattatggatgtatctattcaatttctcagtttatgttgggccttcctttttggaatgtacgctgttatgctatgataaatgatataatgagtaaaaattattcaaagccaaaaatgaaatacaaagatttccttctttgactatttaggaaagactaagcaaccaaatagcaaagatccctcaggataatgaggtttatgtttggaatagcatgagcagattactacttagg

SEQ ID NO: 358 - DNA, 10951 bp, Homo sapiens
tacaggttttagatggagcaggattagatattgatttccatcttgcctctccagaaggcaaaaccttagtttttgaacaaagaaaatcagatggagttcacacgtaagtaatctcttttagttgagtttcattgctgaataataccagtgggttatctgcagggcatggaaagttagcacatttgatactacatatcaatattagataattccatatgatttaaaacagttcatgatagtgtgccatctgataaacaaaaacatcttccattaacctttctatttttgtttaagcgttttcttttgatccaggctaaattttttctgtgctttggttagtaaattagtattcccctggtattccattcaatctatcgtggcattttaaacctgccttctggccagcacaagctttctattttaacttaaagctactgttccaggtatatgtcttaaagtttcttgagctgctggctatatgccatttttgtccatagttttctttcttaaaacaggacagtatatctttgtgtgtacgtaaattttttttttttattcagacctcattcgttttaggtaattagaaggcctgaaagtaaaagatctgatcatagggaactatataaaaataaaatacttgttataactctttgagttcagagttcagcaaaagaccatatattcttcttctgacacctcacttccctcttttcatatctcactggtatgtttcctggttccattctattatcttactataacattttcttaagtcagttttgttatatgtttaaactgtgagtctgtaggaagaagagcaaatatggagtatctagtatttgctataaacaagggttggcatgttataggcttctaaattaatctttccattacactatgagatagagtctttgactcaagattcccattttatagacaaggaggctcagagaagtcaaataagtctccagggatacacatgcagggtggagacaggatggaccaaaactctttgctttctaccatatgcttagaacatccctggtacataacactattgtaagaactagctattattaaaattattggtctttgttaaccaaaatgcctgatacataatcgatactcagtaaacactgaatacatgtatgaatggatgagaggaaaaaaatgtctcaacaataattttttaagatactcatttaaaatgcattttaaatggcattttacctatgcagagctcagaaaaatatttgcataagctattactaaataagatagaaatagtaattttaaaagtcagtttatattgatatacttggaattaactgttttctctttgataggtgtataagaagtaaaaatgggccaggcactgcggttcacgcctataatcccagcactttccgaggccaaggtgggtggatcacgaggtcaagaaattgagaccatcctggccaacatggtgaaaccttgtctctactaaaaatacaaaaattagctggtcatggtggcacacgcctgtagtcccagctacttgggaggctgaggcagaattgcttgaaccccggaggcggaggttgcagtgagctgagatggcgccgctgtactccagcctggcgacagagactccatctcaaaaaaaaaaacaaaactaaaaatgtagttcatcttttaagtttcagaattttaaaaatgttcaaaatgtatgtcagtctttatttctccccaattatttgctccctttttgagataataaaattcactgttagaaaaataagtatcttactgcttccttgtgtagaattacctctcattaaataattgggagaaaataattgagtttataatagttcacatttattgcattcttttgatatgccaggccagtgttctcagcacttttcatgtactaatttttttattcttaaccacagtcctatgacgtaaatattattttaccaatggggaaactgaggcatagaacaattaagttgctgaaggttacacagctagtgaacggcaaagccaggatatacattcaggcagtccaactcactattaatcactataccagatttacaaattttggtttttttttatttttattttgagacggagtctcactctgttgcccacatggagtgcaatggggcgatctcggatcactggaagctccgcctcctgggttcacgccattctcctgcctcggcctcctgagtagctgggactacaggcgcccgccaccacgcccggctaattttttgtctttttagtagagacggggtttcaccgtgttagccaggatggtctggatctcctgacctcgtgatctgcctgcctcggcctcccaaagtgctgggattataggcgtgagccactgtgcccggcctacaaatctgttttttaaacattaaacaaagcttttatctttagctatattaattttgtaagagcagcaaacatctgagtatgtcactggtttttcttaagtaggctttttctttttcttttaaatgtaatttcttttttaaagacaaggtctcactatgttgcccaggccagagtgcaatggtgtgaccatagcttactgcagcctaaagtactgggctcaaccaagcctcccgagtagcttggactacaggtgtgtactcggctaattttttaatttttgtagagacaaggtctcacttttgcccaggctaatctcgaacccctggcctacagtaatcctgcctcagactcccaaagcgctgtgattgtaggtatgagccaccgcacctggccctgcttttaactttcgctaatatgggaaactaattttaactagggtactggtaattcagatattattcatttttttcttcagcacttggcataattaatgatgggctgaattacctttatagaattaaataataaaatataaactagttttatttaattctcaaaaaaagcatttaggatcaaacataaacatctataagggagccagtggcagttaataggcaaaatcagtaagaggcctggaagaagacatttaggacaatccatcactgcttttgaaaacaaaactcagtttaatctcagttgtagggtaggttggcagtcatatctgcatatgaattgaactcatgataaaatacttttaataatgtataaatattaaagtttattatgagttatgtatacaggtttttaattctatccttttccaaaaatgaggtcactaaccataatttactgagtaaatgccaaacatgtctaagttgtacttgaacatatatattttcaggttgcttctttcccaagaaattataaattatctttcaatactaaggaaatttatgggtaagctgtccaattactataaactatgttatttgttttttgttttgttggtttctttttttttttttttttttttgagacaggatcttgctctgttgcccaggctggagtgcagtggcatgatcatgcctcactgcatcttcaaccttccgggctcaagcaatcctcacactctgctaatttttgttatttttttgtagagacaggattttgccatgttacccaggctggtctcaaactcctgagctaaagtgatctaccagccttgccctctcaaaatgctgggattacaggtgtgaggcaacacactcagcctgttacttcttatttttacctttagttgcttttcatcacaaatagaaatacaggtaacttaaaacatgtacttttttttatacagtgtagagactgaagttggtgattacatgttctgctttgacaatacattcagcaccatttctgagaaggtgattttctttgaattaatcctggataatatgggagaacaggcacaagaacaagaagattggaagaaatatattactggcacagatatattggatatgaaactggaagacatcctggtcagtatggtcttctaataaaataaaaattattaacagccagaggccttactatggtaataagttactgaactaagcattttatctgcattatccaggaaaatctgtttctaatattttatttttgccataaatactttgacctcaagtatcagcttaattttattttatattaatatagcccttttatagttttcaaataacttatcttccaggaccctattataaaaatagcttcagatgtgcaaataagactgcatcttggtaagtttgttttataaatgtgcagttagaatttttaaattataaatagattatgcttctgattatacagcaggcatatgaaaagtaaaatgttttctaatttcacaactattttgtggtattaaaacattgggtgttttactgaatactaaattgttcagataaacatacaaagaaggaaatattataaacacatgcattatgtaataggtaaatacctaaagttatatcaattgggtttttaaaaatgaaatcatttgccaggcatggtagcaggtacctgtaatcccagctactcagaaggttagggggaggatcatttgagcccagttcaaggctgcagtgaaccatggtcacacatataaatagatactacactccaatatagcaagaccccatctctaaaaacttaatcatttgaccaggcacagtctcaggttgcaatgagccgagattgtgcctaggcaaactccatcccccgacaaaaaaaaaaaaaaaaaaaaccttagtcatttcctttggttgtgtgaggactaagaaagagataatgtacgtaaaactcctgatgctatgccactcagaataatttcatgttacctattttcaattcacagtagctttgttcccttgttaaataactacttataaacaatataaatatgtcaggagaactattatataaccttacagagaatctctaatgtaatataaatagtacctgccctttaattgaattgtgcagccatctaacttaaaattgtgtttggataaaaaacataaagcatattttgaaaaaaactttttttgagacagggtctcactcactctgttgcccaggctggagtgcagtggcaccattatggctcattgcaatctcaacctcctggactcaagtgatccccccacctcagcctcccaagtagctgggaccacacttggtgctaccatacccatctttttgtagaggcagagtctgtctgtgttgtccagcccagtcttgaactcctgggttcaaggggtcctcctgccctagtctcccaaagttccaggattacaaggcatgagtcactgcacccagcctcattttttaattaagttaaaatttctgagcattctttaataataaaattattttatttatctccaggaatccatcaacagcatcaagtccagactaagcaaaagtgggcacatacaaactctgcttagagcatttgaagctcgtgatcgaaacatacaagaaagcaactttgatagagtcaatttctggtctatggttaatttagtggtcatggtggtggtgtcagccattcaagtttatatgctgaagagtctgtttgaagataagaggaaaagtagaacttaaaactccaaactagagtacgtaacattgaaaaatgaggcataaaaatgcaataaactgttacagtcaagaccattaatggtcttctccaaaatattttgagatataaaagtaggaaacaggtataattttaatgtgaaaattaagtcttcactttctgtgcaagtaatcctgctgatccagttgtacttaagtgtgtaacaggaatattttgcagaatataggtttaactgaatgaagccatattaataactgcattttcctaactttgaaaaattttgcaaatgtcttaggtgatttaaataaatgagtattgggcctaattgcaacaccagtctgtttttaacaggttctattacccagaacttttttgtaaatgcggcagttacaaattaactgtggaagttttcagttttaagttataaatcacctgagaattacctaatgatggattgaataaatctttagactacaaaagcccaacttttctctatttacatatgcatctctcctataatgtaaatagaataatagctttgaaatacaattaggtttttgagatttttataaccaaatacatttcagtgtaacatattagcagaaagcattagtctttgtactttgcttacattcccaaaagctgacattttcacgattcttaaaaacacaaagttacacttactaaaattaggacatgttttctctttgaaatgaagaatatagtttaaaagcttcctcctccatagggacacattttctctaacccttaactaaagtgtaggattttaaaattaaatgtgaggtaaaataagtttatttttaatagtatctgtcaagttaatatctgtcaacagttaataatcatgttatgttaattttaacatgattgctgacttggataattcattattaccagcagttatgaaggaaatattgctaaaatgatctgggcctaccataaataaatatctccttttctgagctctaagaattatcagaaacaggaaagaatttagaaaaacttgagaaaacctaatccaaaataaaattcacttaagtagaactataaataaatatctagaatctgactggctcatcatgacatcctactcataacataaatcaaaggagatgattaatttccagttagctggaagaaactttggctgtaggtttttattttctacaagaattctggtttgaattatttttgtaagcaggtacattttataaaatgtaagccctactgtaaggtttagcactgggtgtacatatttattaaaaatttttattataacaacttttattaaaatggcctttctgaacactttatttattgatgttgaagtaaggattagaaacatagactcccaagttttaaacacctaaatgtgaataacccatatatacaacaaagtttctgccatctagctttttgaagtctatgggggtcttactcaagtactagtaatttaacttcatcatgaatgaactattatttttaagttatgcccatttataacgttgtttatgactacattgtgagttagaaacaaacttaaaatttggggtatagaacccctcaacaggttagtaatgctggaattcttgatgagcaataatgataaccagagagtgatttcatttacactcatagtagtataaaaagagatacatttccctcttaggccatgcgagaagagcagcttagatttccctactggcaaggtttttaaaaatgaggtaaatgccgtatatgatcaattaccttaattggccaagaaaatgcttcaggtgtctaggggtatcctctgcaacacttgcagaacaaaggtcaataagatccttgcctatgaatacccctcccttttgcgctgttaaatttgcaatgagaagcaaatttacagtaccataactaataaagcagggtacagatataaactactgcatcttttctataaaactgtgattaagaattctacctctcctgtatggctgttactgtactgtactctctgactccttacctaacaatgaatttgttacataatcttctacatgtatgatttgtgccactgatcttaaacctatgattcagtaacttcttaccatataaaaacgataattgctttatttggaaaagaatttaggaatactaaggacaattatttttatagacaaagtaaaaagacagatatttaagaggcataaccaaaaaagcaaaacttgtaaacagagtaaaaatctttaatatttctaaagacatactgtttatctgcttcatatgctttttttaatttcactattccatttctaaattaaagttatgctaaattgagtaagctgtttatcacttaacagctcattttgtctttttcaatatacaaattttaaaaatactacaatatttaactaaggcccaaccgatttccataatgtagcagttaccgtgttcacctcacactaaggcctagagtttgctctgatatgcatttggatgattaatgttatgctgttctttcatgtgaatgtcaagacatggagggtgtttgtaattttatggtaaaattaatccttcttacacataatggtgtcttaaaattgacaaaaaatgagcacttacaattgtatgtctcctcaaatgaaaattctttatctgaaattttaaaagacattgattccacatgtaaggatttttcatctgaagtacaataatgcacaatcagtgttgctcaaactgctttatacttataaacagccatcttaaataagcaacgtattgtgagtactgatatgtatataataaaaattatcaaagaaaattaactgccagtcatttgtaaatgctgtctactcctgaaagccttccttcatctctatttagttaataatgtgctctctcctcctgttttgaaaccccatagctctctacacctcttattgtacatcactctactttgcattggagttctgtttctatatgtacttattcacctgttgcctaaacatgcactgttcctaaaaggtacagtttttgctcaaaatatatgaaaggaaagataatcagttcttaaagtttggtatgctaaataagcacccagggaacttacctgctccacctcaccccagaaattgattattcaggtctggaatatggctcaggattcttaattttcaaccaacacaatatagaatcctgtcagttatccttggatcatttgctaagtgatcttgcaaaatcaaaactcctttgagactatttcattttcagaaatattttaaaacttgttcagaaacatcttaaaacttgttagcatataggaaaagtacaatgcttggtgtaggtaggttattatttggtcatttccctcaaaccatccagacaagccactcttctaccacaagctggtagaaatccttaggcacctttctgcttctgcactgctatcactttcaggtgtctaaggcttctggaaggctgttgtcataacctggagccatacacctaatgtacgtctggggaaaggacaccaattaaagaatctagagctaggatgatgttacataagacagggcacaatggagatggactctggatccctgcatctgaaagaaaaaggcaagaaaatgcagggcagggaaaatcctgaaggtcttcactgaccatgaattaaaatcctaattgacagttttacaaacaaaaaccctcgttttagtacttgtgttgtttttgtttctgttttaacaagcttagatttattattgtgccttttatggaagatgaggaagaaataggaaagcagtaaaatgaacaatgagaatctgttacccaaactgatataaactccctcagaaagaaagatactactccctaatcctggaagtgttaagtggcaataatgatcaaatgttgtaaaggggattgttactacagctaatatgaaatgggaggctggactaaatctaacctttctacccttgatttcaattctaaaaggacacgtaataccattgcagaaagaaaagacagttccaaatgataaattttagagttgttttgctaggatgcaagagaaattggataagtggaccactcatacgttgctggtgagatatgaaatagtagagccactgtggaaaatattcttggcagtttcttataaaactaaacatacatttaacatataactggcatttgtactacttgacagttatccctgagaagttaaaacttaacattcacaaatgttacatagcaccttcatttataatagccaaaacccggaaacaacctggatgtccttcaaaaagagtgaatggtttagtatgtccacaccatggaatactaaatagtaatatgaaggaacaaactactgatacatgtaacaaattgcatggacctcaagggaattatgcttgggtggtttggggggacaatcctaaagttttacacactgtatgattctgtttttgtaacattcttaaataataaagctatagagatgggaaacaagattcgtggttgccaggtcttgggactgaagggaaggagaatgtggctataaagggagccttgtggtggaaaagttctgtagtttgattgtggtgattacataaatatacatgtgaaatgttagaagtatttatagctgaaacatattagtatgttggtatatacatatttctgactaattaatttcgccatgttgcccaggctggtctcgaactcctaagctcaagtgatgtgcccgcctcaacttcccaagtgctgagattacaggcgtgagccaccatgtccggcctgttttttcctatgcatgcataattacgatcaagtttaatttgtaattaggcacattaagagattaacaatagctaacaaaatggaacaattacaacaatatattgtaataaaagttatgcaaatgtggtttctctctctcaaaatatcttgtactcacccttgtgaggctgtgagatgtcatacaatgcctacatgaagagatgaaatgaggtgactgatgtaggtataagtgatgtagttaggctacattatcatcaaaataacttcgggtaatcctggatcactgagccaaggtaatgttgatggttaaggagcagacaatgttgatggttggggatcctcaataggtgaaggatttctattttggggtctttttgctgaaaaattttggaagaacactgtaaccagaagttgttgactcttcagctcatcgaagtgttgctgcagagactgtaatcctttggtgatcatattggtaactttaatgctgtgtctcatctgaggatcgtattctataattctgttgtttaatgtctgtgcaattcaaaacacttcggcaagtttaattaatgtctatgttggcta

SEQ ID NO: 359 - DNA, 10949 bp, Homo sapiens
tacaggttttagatggagcaggattagatattgatttccatcttgcctctccagaaggcaaaaccttagtttttgaacaaagaaaatcagatggagttcacacgtaagtaatctcttttagttgagtttcattgctgaataataccagtgggttatctgcagggcatggaaagttagcacatttgatactacatatcaatattagataattccatatgatttaaaacagttcatgatagtgtgccatctgataaacaaaaacatcttccattaacctttctatttttgtttaagcgttttcttttgatccaggctaaattttttctgtgctttggttagtaaattagtattcccctggtattccattcaatctatcgtggcattttaaacctgccttctggccagcacaagctttctattttaacttaaagctactgttccaggtatatgtcttaaagtttcttgagctgctggctatatgccatttttgtccatagttttctttcttaaaacaggacagtatatctttgtgtgtacgtaaattttttttttttattcagacctcattcgttttaggtaattagaaggcctgaaagtaaaagatctgatcatagggaactatataaaaataaaatacttgttataactctttgagttcagagttcagcaaaagaccatatattcttcttctgacacctcacttccctcttttcatatctcactggtatgtttcctggttccattctattatcttactataacattttcttaagtcagttttgttatatgtttaaactgtgagtctgtaggaagaagagcaaatatggagtatctagtatttgctataaacaagggttggcatgttataggcttctaaattaatctttccattacactatgagatagagtctttgactcaagattcccattttatagacaaggaggctcagagaagtcaaataagtctccagggatacacatgcagggtggagacaggatggaccaaaactctttgctttctaccatatgcttagaacatccctggtacataacactattgtaagaactagctattattaaaattattggtctttgttaaccaaaatgcctgatacataatcgatactcagtaaacactgaatacatgtatgaatggatgagaggaaaaaaatgtctcaacaataattttttaagatactcatttaaaatgcattttaaatggcattttacctatgcagagctcagaaaaatatttgcataagctattactaaataagatagaaatagtaattttaaaagtcagtttatattgatatacttggaattaactgttttctctttgataggtgtataagaagtaaaaatgggccaggcactgcggttcacgcctataatcccagcactttccgaggccaaggtgggtggatcacgaggtcaagaaattgagaccatcctggccaacatggtgaaaccttgtctctactaaaaatacaaaaattagctggtcatggtggcacacgcctgtagtcccagctacttgggaggctgaggcagaattgcttgaaccccggaggcggaggttgcagtgagctgagatggcgccgctgtactccagcctggcgacagagactccatctcaaaaaaaaaaacaaaactaaaaatgtagttcatcttttaagtttcagaattttaaaaatgttcaaaatgtatgtcagtctttatttctccccaattatttgctccctttttgagataataaaattcactgttagaaaaataagtatcttactgcttccttgtgtagaattacctctcattaaataattgggagaaaataattgagtttataatagttcacatttattgcattcttttgatatgccaggccagtgttctcagcacttttcatgtactaatttttttattcttaaccacagtcctatgacgtaaatattattttaccaatggggaaactgaggcatagaacaattaagttgctgaaggttacacagctagtgaacggcaaagccaggatatacattcaggcagtccaactcactattaatcactataccagatttacaaatttttttttttttttttttttttgagacggagtctcactctgttgcccagctggagtgcagtggcgcgatctcggctcactgcaagctccgcctcctgggttcacgccattctcctgcctcggcctcctgagtagctgggactacaggcgcccgccaccacgcccggctaattttttgtctttttagtagagacggggtttcaccgtgttagccaggatggtctggatctcctgacctcgtgatctgcctgcctcggcctcccaaagtgctgggattataggcgtgagccactgtgcccggcctacaaatctgttttttaaacattaaacaaagcttttatctttagctatattaattttgtaagagcagcaaacatctgagtatgtcactggtttttcttaagtaggctttttctttttcttttaaatgtaatttcttttttaaagacaaggtctcactatgttgcccaggccagagtgcaatggtgtgaccatagcttactgcagcctaaagtactgggctcaaccaagcctcccgagtagcttggactacaggtgtgtactcggctaattttttaatttttgtagagacaaggtctcacttttgcccaggctaatctcgaacccctggcctacagtaatcctgcctcagactcccaaagcgctgtgattgtaggtatgagccaccgcacctggccctgcttttaactttcgctaatatgggaaactaattttaactagggtactggtaattcagatattattcatttttttcttcagcacttggcataattaatgatgggctgaattacctttatagaattaaataataaaatataaactagttttatttaattctcaaaaaaagcatttaggatcaaacataaacatctataagggagccagtggcagttaataggcaaaatcagtaagaggcctggaagaagacatttaggacaatccatcactgcttttgaaaacaaaactcagtttaatctcagttgtagggtaggttggcagtcatatctgcatatgaattgaactcatgataaaatacttttaataatgtataaatattaaagtttattatgagttatgtatacaggtttttaattctatccttttccaaaaatgaggtcactaaccataatttactgagtaaatgccaaacatgtctaagttgtacttgaacatatatattttcaggttgcttctttcccaagaaattataaattatctttcaatactaaggaaatttatgggtaagctgtccaattactataaactatgttatttgttttttgttttgttggtttctttttttttttttttttttttgagacaggatcttgctctgttgcccaggctggagtgcagtggcatgatcatgcctcactgcatcttcaaccttccgggctcaagcaatcctcacactctgctaatttttgttatttttttgtagagacaggattttgccatgttacccaggctggtctcaaactcctgagctaaagtgatctaccagccttgccctctcaaaatgctgggattacaggtgtgaggcaacacactcagcctgttacttcttatttttacctttagttgcttttcatcacaaatagaaatacaggtaacttaaaacatgtacttttttttatacagtgtagagactgaagttggtgattacatgttctgctttgacaatacattcagcaccatttctgagaaggtgattttctttgaattaatcctggataatatgggagaacaggcacaagaacaagaagattggaagaaatatattactggcacagatatattggatatgaaactggaagacatcctggtcagtatggtcttctaataaaataaaaattattaacagccagaggccttactatggtaataagttactgaactaagcattttatctgcattatccaggaaaatctgtttctaatattttatttttgccataaatactttgacctcaagtatcagcttaattttattttatattaatatagcccttttatagttttcaaataacttatcttccaggaccctattataaaaatagcttcagatgtgcaaataagactgcatcttggtaagtttgttttataaatgtgcagttagaatttttaaattataaatagattatgcttctgattatacagcaggcatatgaaaagtaaaatgttttctaatttcacaactattttgtggtattaaaacattgggtgttttactgaatactaaattgttcagataaacatacaaagaaggaaatattataaacacatgcattatgtaataggtaaatacctaaagttatatcaattgggtttttaaaaatgaaatcatttgccaggcatggtagcaggtacctgtaatcccagctactcagaaggttagggggaggatcatttgagcccagttcaaggctgcagtgaaccatggtcacacatataaatagatactacactccaatatagcaagaccccatctctaaaaacttaatcatttgaccaggcacagtctcaggttgcaatgagccgagattgtgcctaggcaaactccatcccccgacaaaaaaaaaaaaaaaaaaaaccttagtcatttcctttggttgtgtgaggactaagaaagagataatgtacgtaaaactcctgatgctatgccactcagaataatttcatgttacctattttcaattcacagtagctttgttcccttgttaaataactacttataaacaatataaatatgtcaggagaactattatataaccttacagagaatctctaatgtaatataaatagtacctgccctttaattgaattgtgcagccatctaacttaaaattgtgtttggataaaaaacataaagcatattttgaaaaaaactttttttgagacagggtctcactcactctgttgcccaggctggagtgcagtggcaccattatggctcattgcaatctcaacctcctggactcaagtgatccccccacctcagcctcccaagtagctgggaccacacttggtgctaccatacccatctttttgtagaggcagagtctgtctgtgttgtccagcccagtcttgaactcctgggttcaaggggtcctcctgccctagtctcccaaagttccaggattacaaggcatgagtcactgcacccagcctcattttttaattaagttaaaatttctgagcattctttaataataaaattattttatttatctccaggaatccatcaacagcatcaagtccagactaagcaaaagtgggcacatacaaactctgcttagagcatttgaagctcgtgatcgaaacatacaagaaagcaactttgatagagtcaatttctggtctatggttaatttagtggtcatggtggtggtgtcagccattcaagtttatatgctgaagagtctgtttgaagataagaggaaaagtagaacttaaaactccaaactagagtacgtaacattgaaaaatgaggcataaaaatgcaataaactgttacagtcaagaccattaatggtcttctccaaaatattttgagatataaaagtaggaaacaggtataattttaatgtgaaaattaagtcttcactttctgtgcaagtaatcctgctgatccagttgtacttaagtgtgtaacaggaatattttgcagaatataggtttaactgaatgaagccatattaataactgcattttcctaactttgaaaaattttgcaaatgtcttaggtgatttaaataaatgagtattgggcctaattgcaacaccagtctgtttttaacaggttctattacccagaacttttttgtaaatgcggcagttacaaattaactgtggaagttttcagttttaagttataaatcacctgagaattacctaatgatggattgaataaatctttagactacaaaagcccaacttttctctatttacatatgcatctctcctataatgtaaatagaataatagctttgaaatacaattaggtttttgagatttttataaccaaatacatttcagtgtaacatattagcagaaagcattagtctttgtactttgcttacattcccaaaagctgacattttcacgattcttaaaaacacaaagttacacttactaaaattaggacatgttttctctttgaaatgaagaatatagtttaaaagcttcctcctccatagggacacattttctctaacccttaactaaagtgtaggattttaaaattaaatgtgaggtaaaataagtttatttttaatagtatctgtcaagttaatatctgtcaacagttaataatcatgttatgttaattttaacatgattgctgacttggataattcattattaccagcagttatgaaggaaatattgctaaaatgatctgggcctaccataaataaatatctccttttctgagctctaagaattatcagaaacaggaaagaatttagaaaaacttgagaaaacctaatccaaaataaaattcacttaagtagaactataaataaatatctagaatctgactggctcatcatgacatcctactcataacataaatcaaaggagatgattaatttccagttagctggaagaaactttggctgtaggtttttattttctacaagaattctggtttgaattatttttgtaagcaggtacattttataaaatgtaagccctactgtaaggtttagcactgggtgtacatatttattaaaaatttttattataacaacttttattaaaatggcctttctgaacactttatttattgatgttgaagtaaggattagaaacatagactcccaagttttaaacacctaaatgtgaataacccatatatacaacaaagtttctgccatctagctttttgaagtctatgggggtcttactcaagtactagtaatttaacttcatcatgaatgaactataatttttaagttatgcccatttataacgttgtttatgactacattgtgagttagaaacaaacttaaaatttggggtatagaacccctcaacaggttagtaatgctggaattcttgatgagcaataatgataaccagagagtgatttcatttacactcatagtagtataaaaagagatacatttccctcttaggcccctgggagaagagcagcttagatttccctactggcaaggtttttaaaaatgaggtaaatgccgtatatgatcaattaccttaattggccaagaaaatgcttcaggtgtctaggggtatcctctgcaacacttgcagaacaaaggtcaataagatccttgcctatgaatacccctcccttttgcgctgttaaatttgcaatgagaagcaaatttacagtaccataactaataaagcagggtacagatataaactactgcatcttttctataaaactgtgattaagaattctacctctcctgtatggctgttactgtactgtactctctgactccttacctaacaatgaatttgttacataatcttctacatgtatgatttgtgccactgatcttaaacctatgattcagtaacttcttaccatataaaaacgataattgctttatttggaaaagaatttaggaatactaaggacaattatttttatagacaaagtaaaaagacagatatttaagaggcataaccaaaaaagcaaaacttgtaaacagagtaaaaatctttaatatttctaaagacatactgtttatctgcttcatatgctttttttaatttcactattccatttctaaattaaagttatgctaaattgagtaagctgtttatcacttaacagctcattttgtctttttcaatatacaaattttaaaaatactacaatatttaactaaggcccaaccgatttccataatgtagcagttaccgtgttcacctcacactaaggcctagagtttgctctgatatgcatttggatgattaatgttatgctgttctttcatgtgaatgtcaagacatggagggtgtttgtaattttatggtaaaattaatccttcttacacataatggtgtcttaaaattgacaaaaaatgagcacttacaattgtatgtctcctcaaatgaaaattctttatctgaaattttaaaagacattgattccacatgtaaggatttttcatctgaagtacaataatgcacaatcagtgttgctcaaactgctttatacttataaacagccatcttaaataagcaacgtattgtgagtactgatatgtatataataaaaattatcaaagaaaattaactgccagtcatttgtaaatgctgtctactcctgaaagccttccttcatctctatttagttaataatgtgctctctcctcctgttttgaaaccccatagctctctacacctcttattgtacatcactctactttgcattggagttctgtttctatatgtacttattcacctgttgcctaaacatgcactgttcctaaaaggtacagtttttgctcaaaatatatgaaaggaaagataatcagttcttaaagtttggtatgctaaataagcacccagggaacttacctgctccacctcaccccagaaattgattattcaggtctggaatatggctcaggattcttaattttcaaccaacacaatatagaatcctgtcagttatccttggatcatttgctaagtgatcttgcaaaatcaaaactcctttgagactatttcattttcagaaatattttaaaacttgttcagaaacatcttaaaacttgttagcatataggaaaagtacaatgcttggtgtaggtaggttattatttggtcatttccctcaaaccatccagacaagccactcttctaccacaagctggtagaaatccttaggcacctttctgcttctgcactgctatcactttcaggtgtctaaggcttctggaaggctgttgtcataacctggagccatacacctaatgtacgtctggggaaaggacaccaattaaagaatctagagctaggatgatgttacataagacagggcacaatggagatggactctggatccctgcatctgaaagaaaaaggcaagaaaatgcagggcagggaaaatcctgaaggtcttcactgaccatgaattaaaatcctaattgacagttttacaaacaaaaaccctcgttttagtacttgtgttgtttttgtttctgttttaacaagcttagatttattattgtgccttttatggaagatgaggaagaaataggaaagcagtaaaatgaacaatgagaatctgttacccaaactgatataaactccctcagaaagaaagatactactccctaatcctggaagtgttaagtggcaataatgatcaaatgttgtaaaggggattgttactacagctaatatgaaatgggaggctggactaaatctaacctttctacccttgatttcaattctaaaaggacacgtaataccattgcagaaagaaaagacagttccaaatgataaattttagagttgttttgctaggatgcaagagaaattggataagtggaccactcatacgttgctggtgagatatgaaatagtagagccactgtggaaaatattcttggcagtttcttataaaactaaacatacatttaacatataactggcatttgtactacttgacagttatccctgagaagttaaaacttaacattcacaaatgttacatagcaccttcatttataatagccaaaacccggaaacaacctggatgtccttcaaaaagagtgaatggtttagtatgtccacaccatggaatactaaatagtaatatgaaggaacaaactactgatacatgtaacaaattgcatggacctcaagggaattatgcttgggtggtttggggggacaatcctaaagttttacacactgtatgattctgtttttgtaacattcttaaataataaagctatagagatgggaaacaagattcgtggttgccaggtcttgggactgaagggaaggagaatgtggctataaagggagccttgtggtggaaaagttctgtagtttgattgtggtgattacataaatatacatgtgaaatgttagaagtatttatagctgaaacatattagtatgttggtatatacatatttctgactaattaatttcgccatgttgcccaggctggtctcgaactcctaagctcaagtgatgtgcccgcctcaacttcccaagtgctgagattacaggcgtgagccaccatgtccggcctgttttttcctatgcatgcataattacgatcaagtttaatttgtaattaggcacattaagagattaacaatagctaacaaaatggaacaattacaacaatatattgtaataaaagttatgcaaatgtggtttctctctctcaaaatatcttgtactcacccttgtgaggctgtgagatgtcatacaatgcctacatgaagagatgaaatgaggtgactgatgtaggtataagtgatgtagttaggctacattatcatcaaaataacttcgggtaatcctggatcactgagccaaggtaatgttgatggttaaggagcagacaatgttgatggttggggatcctcaataggtgaaggatttctattttggggtctttttgctgaaaaattttggaagaacactgtaaccagaagttgttgactcttcagctcatcgaagtgttgctgcagagactgtaatcctttggtgatcatattggtaactttaatgctgtgtctcatctgaggatcgtattctataattctgttgtttaatgtctgtgcaattcaaaacacttcggcaagtttaattaatgtctatgttggcta

SEQ ID NO: 360 - DNA, 389 bp, Homo sapiens
agtgaggttttatctggaggtaaaaataccacctcaacattttcattttcatagcagacagattcatgtattgtccattattaatactttaaattctaaccctttctctttcaagtatttttgcacttctgggatgaagcactggtggaaccattccataaaaatggctgtcacccacactgattatgttgccaagacacataatattttgttttgttttcgagatcatgtaggttcttcactctatacactacacctcgctttatcatatgccctgcagcaatgccatatagtaccagagttaatctgttcttccatgctgtatgccctgataccgccgcatttgcacttttatgaatctaagttctattgggcatcttctcccagaa

SEQ ID NO: 361 - DNA, 389 bp, Homo sapiens; identical to SEQ ID NO: 360

SEQ ID NO: 362 - DNA, 2761 bp, Homo sapiens
cttctgcctctcccgctatctagatggctcggggaggcacaccacacaccaggtcaccttcctctctgaacccccagcacctcatactgtttctgtgcagagataaggctgggtgaaagcttgtgtgaatgatctgaagtcttctactctaggccagtctccaggagcattatgatctttaggagggtgggcttggttcctctgtacaataatgggtcataaaactgagtggtcaagatcatcccggtgagggcagtccgtgtgttgccatagttgctgtaccggttaagaatgcacctggctgcaatttcctgaaaacctgacgtatagtggcttaaacaaagagtggtttattttccttctgtcatagcaatctgggggaggccactgtggctttggcgcaggaggtcgggaaaggcccgcttctctgatatcattgggggcctccccagtgcttgtgtggcagaatgacaagaggaagaagaaggagaattatggcactgagtatcatgagatttggggtcatatatctttagtgggcggtgtttgctgccccaaatgtctcatgccattaaaatgttctggaaatgatttaggtagttggagtttccttcccaaagacaaggcatttacagcatgatgtccaatatccattgagtttgtgtcatgcattcattgtattcatagtctgctttaggtacttagcaaaatattgctgatattaacatgcctttgtttgcttcactggagatgaaattgtgctccaagtgttttccaaggttccgtatgacccatcatttgatgaaacaagaacagcagtcagatccattacaaagagagacacacaaaaaagcaagtatatgtcgttaacctgacatgtgtacatacctctacagacctctgtgttatctcaaatatgcgatgctagcattttagcattccttaaattaactactgtggtggagggggtgcaaagccaaactgagatgtgaagaactctctgaaatcccctctacagtcttcctcccaatatgggagtctataggcttcagtgtgaatatccctgtattttggggtgatccctgacgtgcagtgtcaggcatgttctgccactctggaggctgtgcagaggacagaaacccggtttgcaagtggggttcactgttccttgtaacaggagctatgagaagtgtaatcactttctgttcaccagcgctttataggtcactgcccaggagtgcccaagtcaccggcttgggagagtaatgtcttcctgcgtccctccctgtcacctctgccatcattccacctcatcctctgtaaaatatttgcccagagaagcagagctgatttctcttccagcactgatgctccagtgccaatgctgagaggaagcagctggccacatatgcaaaaataatgcatattaaccccaaatcacatgaagaaaagagaaaccttgtaaggtggacatcatgtgaattaggaagaaaagtaacaatgagtaattagttatcagaataagccagctatgtgtgccaggaattataagactctcagtaaagcaatttagtaactaatcactctgccaatgcattccataagccattgagaaaacatatgaatatttcactgcataatctcaatagcttgccctgcaccatgttttatgatgctcccttggcagatacattttgaggaacacatttttagcaaagtgcttgcatgattaagtatgtctattcttaatgatttatcagtgtcttattaacagagaactgtgcattgtcatttattggatcaaagtggttgtacttgaaatcatttgccatacaccatgtaggcctttctacccgttttcctgtagcattaaacctgccatgtgcacaaatctctcaatgcttatgcatattgtctgtcaacagactatgtgaaaatgagcttagcccctggtgttgtgttggaacttcagatgcttgcagacacttcatgaatgctctgtgacactcagaataggtgggttcaggccaagtgcatgatgctcacctcaaaatcccgtgcagaagagtatcaatctgaagggaacagctgcagacccaatgaaagacttaatcacagccatggtttattttcccttaggctattcccaacagaagagcttgaacaatgctgcatttgcatcaggttcaaatgagcgagaggaacatttggctaaaatatttggtaagtagcctcctgctatgaagcctttagcctgtgtttgaagagttgcatgcttgtccctggttgtctctcaagtagcctgttcctgctgctttgaggggaaagcaagtgctttgccttgaggctagaatctgtttctctatgagtcaaaacctcgataaattaagctaaacgtggaaaataaacacctggaaaggatcctgctcctcaaagagtgatctatggagcaggagcagggctaccatctggtagtgtgagaataccctggggagactgtttaaaagagacaccccaggccctcgagatgagcctggccaacatggtgaaaccctatctctactcaaaaaatacaaaaattagctgggcatggtggtgtgcacctgtaatcccagctactcgggaggttgaggcaggataattgcttgaacccgggaggcggagcttgcagtgagccgagatcatgccactgcactccagcctgggcgacagagcaagactccatctcaaaaaaaaaaaaaaagaaaaaaaaaaaaaaaaa

SEQ ID NO: 363 - DNA, 196 bp, Homo sapiens
taacacggtgaaatcccgtctctactaaaaatacaaaaaattagcagggcgtggtggtgggtgcctgtagtcccacctactcgggaggctgaggcaggagaatggcatgaacccaggaggcagagcttgcagtgagccgagatcgcgccattgcactccagcctgggcaacagagcaagactctgcctcaaaaaaa

SEQ ID NO: 364 - DNA, 7588 bp, Homo sapiens
ccaggcggggatgctgcggctccgcagcgggctgaggcaccttcgggcaacacccaatactcggggctccgctcggcttctttgcgccgagatgcctaagaaggctggtgcgacgaccaaggccagtagcaggtcccgtggcggcagaggggtgggcctcaggggtacttgttgaagagcgcgggagaagcggggcccgggagtgagtggaggcactgccagcggcttgccgtctctcagttccggggctcaggacagccgccgccacccccagagctgcggcctgctgccgtcgccccgcctcagtaggctgcgctgccgtccacctggtgatttctgagcgctgggcccggcggcagccgagctctccttgggctgcgtgtgctgacctttggcctcctacccgcactcccagtccagcaattcatgttcccgcagcggcatgacctgcgtttccccaggaggctgtattctgctttctcctcccttgctttggctgatcgcaccccttctgtcaagaatacagcactcccatttccaccatctttgtttggccaaccccagtccgtttctcagactcagctcaagcactgcctcctgctggcagcattctccagtgccccaatgctgatttgcctgtggggtaatgttctgtgcctatctcatcggtgcacttagcacagtgtattataattttgtatgttctttctccctcgcagcagtccgagctccttgagagcaaggaccatgtaccttttcatctttacatatccattgcctacatatttgttgaacgaaagttcctagcacagcccctgtcccataacaggcctttaaatatcaagcactatttttttttcctccctttcccgcaacatgcagacatacacactttcaccaacatttattagctccgactgcatgagatacaatgatgaataataaatgatccctgcccccaaggaattggaaatacaaagcagagggaggagcaagcattaaggtttagaagccagagttaggttttcttgcaaggggggaaaaaacactgttgggttgatgggaacccttcgtgggaaaattgagtagagccttgaaggttgtgggaaaagctttctaggtggccagaagtccctggacaccactgatgagcctagtttgtctgttaagggtgaaagggggtagtggaagaatcaaattaaatgtgtgggaaaatattttgtaacctgtaaagttgtgtggttgtcattttagggtaaaagccagagcaaggaaccagagagaccacttcctcccttaggtcctgtggcagttgatcctaaaggatgcgtcaccatagccatccatgcaaaacctggctccaaacaaaatgctgtaacaggtatacctggacactggggtgggattcaagtgtgaatcaggtgtctcctacagccctcctttgctttggttagctgaaagcttattctatgacagttgatttttcacatctgcagttagaggcttctccattttaaaattctagattctaatgtaaaggtgtcttaaagtgaatatatctttaaatcatgccaagttacacgaaaaccattgtatattttcctctttaaaaatacagtattttagaaaggacagttatggaaacttgtgtgtagtctggattattcttagtttgtcctgttccaaaactggagacattggccagagaaagaagagacattttagtgtagtttaatgatcactggcctaaggagagggagaaaacttgagatctgagacccgtgatcagttcctgtgcgaatttgttttaaatcaaaacagtataaaacattcatgggtccagttttttcatctgtcagatgagatcgttggactaagttagaggctttcaggctattctctggagtgctggaggtgcctcaggaatcagctttgggcaaggaggaggccaggcagacagggctcctgactagctctgtttacatttgttttacatattgggattctggagaaaattgggggaagggattctaaaggaaaaaaagttcaaaaaccattgctctaaattcttttgaaggtctttttcacctctaaagctctgtatttcaaaccatttttagattttgaaaggaaaaccacaacattgacgtgctagacctggtttatgctgatgaccaagttaacttagccataccctccttggccagcattttctaagtagtgggtgtggacactgtctacgttggagtattatgtttcattagatctaaaatgggaggctggatgccatggctcatttgtaaaatggagataataatggtactaatatcttcataaagttattataaggattaaagaagttagtatttgtaaagcctttaacacatttgtgtgtgcttaaaattggtgtatagtaagtgctctgtaaatatttgttaagtaaacattattaaattttaaaaacactcaagatatgtgtcacataagaggtgaacctagtccggggctctcattttcctgttgaggaaaccctgcacaaccttgtacaatctagtaagctgccctgtccatacacttcttcagtgacattgatgaggctgaaggccatctatgactccctgcctggggctcttcacataccaagggcaatttccagttgcctaaatccaggatattccccagggctctgtaagcccatcttggtcggcaagattgggtcaataacttttcttctctggatttatttcctgtaatggtagggccatttttatcatgttcatgttccttaaatgtgattagtttaatcattcatttcttcattcaacagtttttaattgaaaatctgtgtgccaggcaaatgcaaaaactcttttacaaaatgtccttgcttcatgaagaaaaagaactccttaaggataaagtccacactattttcattccagatttgacagcagaggctgtaaatgtagctattgcagcacctccatcagagggagaggctaatgctgagctctgtcggtatctttccaaggtcctagaactcaggaagagtgatgtggttttggataaggtaggtctcgctctcttttttttttttttgagacaaaatcttgctctgtcgcccaagctggagtgcagtggcgtagtcttggctcactgcaacctccacctcctgggttcaagctattctcctgcctcagcttcctgagtagctgggattataggcgcatgccaccatgcctggctaatttttgtatttttaatagagacggagtttcaccatgttggtcaggctggtcttgaactcctgacctcaaatgatccacctgccttctcctcccgaagcgctgggattagaggtatgagccaccatgcccggaggtctctctctttttaaacttctttaattattttctttttttttttgagacggagtctcgctctgttgtccagcctggagtgcagtggtgcaatcttgacgcactgctacctctcactcctggattcaagcgattctcctgcctcagcctcctgagtagttgggattacaggcacccaccaccaggcccacctaatttttgtatttgtagtagagacagggtttcaccatgttggacaggctggtcttgaacgcctgacctcaggtgattcacccaccccggcctcccaaagtgctgggattacaggcgtgagccactgcgcctggccttattttatttcttttttgagatggagtcttgctctgttgcccaggctggaatgcagtggcgtgatcttggctcactgcaacctctgcctcccaggttcaagtgattcttcagcctcaggcctcccaagtagctgggattacaggtgcccaccaccacacccagctaatttttgtatttttagtagagacggggtttcatcatgttggccaggctggtcttgaactcctgacctcaactgatctgcccacctcagcctcccaaagtgctgggattacaaacgtgaaccaccatgcccagccatgtttgattattacatattaatgatgattcataaaatactgatttttctttgtctttttcaaataattgggaaactagttgtttataacttttatatttacttaattgcataaatctgtcaattcttcctatttagtctccttcatgcctgctgccttaatccttactgagactatccacactgtgtgcctatgcttcttcactgccgctgttgccagtgttttctcctttctgaattcattcctgaacctgctgtcagattaatcttgcttagctctctcatcctttaagtcatcaccacgctaaacaatctaaagcaattcctattgttagtcatctccatgagggactccgtcaagtactttgtccttgcttgctaggagaagctcattgggaagatagaaggttcatatgatgtcattaatatggttttgcactaggggtggagatcaaagtcacctgggaatgatttctaaatacagatccctgggtatcactctaggcttcttgaaatagaatctgcaggaggggggcccagccatgtttatatttcttaaagctctgcttgttttccagtgctatactatatagctcctatccaggttccagctggcattcacagtcattgattaacagactgcacctaaaaatccatttgaatgctccccacctgtggcaggtcatttctgatttttggctagtgctcatgcgctgacgtttgcctgaaagatgttcctcattcttctgcctgttcaaattccactcatctaaataaaccccttctcaaattttatcttctttaaaggctgtgtttgaaaacaaatcctttctttttcttttgggacggtgttttcgctcttgttgcccaggctagggtgcgatggcgcaatctcggctcactgcaacatccgccccgcgccccgcccctccccggttcaagtgattctcctgcttcagcctcccgagtagctgggattggaggcgcgcgccaacacgtctggctaatttttagtagagacagggttttgccacattggccaggctggtctcgaactcctgacctcaggtgatccacccgcctcagcctcccagagtgctaggattacaggtgtgagccaccacacctggccaacaaatcctttttaaagttttaagtggttgtgaaatcgtggcacttggatatgtggctactttttgtttggaattttcagaaatgtttaacaacatagagaatagcaatttgtttatatttataattattttactacaaagtttatataaaattgcaatatttattttggtattttaaagatgattttcatttttaacttaattgcttgagactagaatatcattttttagattttttttttttttgagatggagtcttgctctgttgcccaggctggagtgcagtggcgcgatctcagctcactgcagcctctgcctcctgggttccagcgattttcctgcctcagtctcctgagtagctgggattacaggcacatgccaccatgcccggctaattttttgtatttttagtacagacggggtttcaccatgttggtcaggctggtcttgaactcctgacctcgtgatctacccaccttggcctcctaaagtgctgggattacaggcgtgagccaccgcgcctggcccatttttgagattttaatgtccagcttttattatagaaattgatgtatgaaggtaaaaaccctggagagttgttagtactaacaaatgtttagtaacaaatggtagtaaggaagaatctaagagatagtctttggttagaccagaagtaaccaagagaaagccatcaggagagcccattatacaacggaggtctgctatctctaatagcattagaatgtgctaaacagtaaagtatgctttttctcttttggtccagggtggtaaatctcgtgaaaaggtggtgaagcttttggcttctacaactccagaagagatcttggagaaattaaaaaaggaagccaaaaaaacataaaagcaagaaatgaggccgggcgcagtggctcatgcctgtaatcccagcactttgggaggccgtggtgggcggatcacctgaggtcaggagttcgagaccagcctgaccaacatggtgaaaccccatctctacgaaaaatacaaaattagccagatgtgatggcgcatgcctgtaatcccagttactcaggaggctgaggcaggagaatcacttgaacctggggggcggaggttgcagtaagccgagatcgcgccgttgcactccagcctgggcaacaagagtgaaactctctccccccgaaaaaaaagaaataaaaaatacatccttgagaaacttttttattgctaatggtgaagaggctgttaaatagaaaaatatactacatgcacagaagaacatgggggacatatatatatgtatatattcgaataagactccaaaaagtagaaatttaaaaagtgctatacattgcatcaggttctaaaatcccaaaccccaaacagcctggaacatgttactctgatttcatggcgttgtaaaataacagagctgggaagaatattcaagatgacctgatttaacacctttcattctgttggggggcctttgatttcctatatccagaagttgagagacttactcaagattgtaccatgcaagctggcaactagaacccaaatccttggactacttgttgaatgcagtttttctagattgtaaattaaaaatcatatctccacaacggttctggaattctggggattgccttctaatccagtttacaagtgacagaaaacctgttatgctgctttgtagtcttaccttagatttttaaatgcttatttaaatgtaaaaaaaattttttttttacatcttttaaagactatatttaccattttgttgaaaaagtaaagaaaaatcatgacttgtaattaaatgtgaattataatttttgagaagtcactgaattttcatcttcctctaataacttaaataatcagcaaattcagtagtttttatgaatctccaaagatccttaaaagaagaaagaggacttggaagctattttcagtatttgtaaaagcttgtcagaaattacatctatattaaagtttcaaaagctaataatatatttttacatcttcaggtcaagttatagtaatttattaaagaaaataaaattaatttcctttgctgatcaggagagctgatctgcagttgtgcgctttgtccagcaagtacatgagaaagatgtattgatggaccaaatcattaaaaacaaaatccacaaggaagaacaataataaaaattgctgatggtagctgggcttggtggctcacgcctgtaatcccagcgctttggaaggttgaggcaggaggaacacttgagcccaggagtttgagaccagcctgggcaacgaagtgagaccctgtatctgtctctgtctctttctttatagatagatagatatacatagatagattttatacatagatatatatatttatatgtaagattatatataagacctcatatataagaagtccaggccgggtgtggtggctc

SEQ ID NO: 365 - DNA, 373 bp, Homo sapiens
ggaaatggggtcagcatactcagaagcaaagaagtagagagagttggatacctgaataaaattgggaaaagttacaaagagaggaatggatgctggagaggaaccaccagtttctactacgataacctatttacttcattttaaacggtgatattttaaacgtgggaacattttgcctagtgagtttttttctttgagaaacgtagcagtatcttgtaacaaagaagatatggggacactctgtcatcaaaaactactttggggccgggcatggtggctcacacctgtaatcccagcactttgggaggccaaggtgggtggatcacctgaggtcaggagttcaagaccagcctggccaccatggtgaaacccc

SEQ ID NO: 366 - DNA, 374 bp, Homo sapiens
cctgcggttactctagttcaggccaccctctcccatttagggggcggatctccctgtctctggcttttcctctgtcggccacagtgcagccggtgtctttctaaaacccagcaaattgggctgctaataatcccttgcttgaaagccttcagtgactccatgatcttgcctctgctgatttgtttcatgtctctccatatcacatgtcgcagtgtatttcctcttcttttacattgtgggatccgctgcgcctggcacaaggtaggtgcgccatcgatacgtggaagattcacaagggccaagccgccacgaggctctatatcgacttgatggccacaggcagcgcgtgggactctgcatctgctgcttggctg

SEQ ID NO: 367 - DNA, 2672 bp, Homo sapiens
tgcgctgggactgatactgtggtcctggtcaccagagccaaaatagggggaaagctggcttggaaaaagcaggcaaccaagggtacacaccgttagccaatatttgcaaggctgttggcagattagatatatctgtactcaaacactgcaatctgatttctctgtcaaaagtacacttaacatttttgtcccattacttaaatctagtggattttctactcagcatcaggtaaggctctcttagcccactgtgtgcgtgtgtgtgtgtgtgtgtgtgtgtgtgtgtgtgtgtgtgtgtatgatagattcttatttaacatgagatatttcctgtgggtgcaagtgcagtagagaaatgggccaagttctctggacacgtgtggatgtgtatattgtgttatacacaaggccccaaattcctgcaactatttatacatgcaattgttctgttgtttgctgagatggaaatcatatacacagagttacaaattcctgaaatgttccatctatatttgatataaacagacatacagtagctgagaaagtaacacagcttgactattgctctgtttaccttctattggaaaaaataattgtatccagaacaccatatcagccttatagcacgactgaatatcatgttgcaattaattaacaacctgatatctatttgggagcaaatttaagggaagactggaggcctaggaaatagaatacaaaatctcaaaactttttaaaaagaagtaattcctgaaagaacaaagcaaactcattccttcataccatgcttctgaaagctattccagcagcccctcccccaaacaggcatgtaatttatggatcttttacaaggtaataaaccacagtaattacctccctgcatcccaaactaagaggacaaattaagtcagaacttgaaaataatttaaaagagttttcccttgtttcaaataggaaaaggaaacgccaagacatagaaaaccacgcttttcccgtaggaagaaccgatgatgagccctgatgaaagaaggaagaagacccgctgtctgcgaaggcctaaaggttagaaatacagcaatttttctcatgccgaaggaaaggcaaaatggtctaagaaactgcaagagtgtgatacaagttttcctcaacagcgagctgggactggcgacaatttcttaactcacagcctccgcagtcgccttagtcgacaaagagagcagcccacgcagcggccgccgcgcccgtgcccgtggcctttacttgcttttgccctgaagttcagtgtagtggtttgtttggggcttgcaggaagaaacaaacacactccctctgactctccacaacccatctttgccttctgcaaccgcttctcctgcccatcgctggttttggggtaggctctttgtctgcctgaggccccgcactcgcagggcaagaagcttaaaggaatccaactccaaactcctccgaagttaaatattgaccagaacctctttcaacaggccgcggttgccaggaaccgtggagggccaactcctcccaaccgccctggtgcaaagtcccacgcggcgaagagttttggagcagcgcttacctagaaagatgtttaaattctgaaccaggaattgtctccaactccaggcgctcagggaatcgccttttccggtgtccaggcgctctgcagacaaataaacagcagaaggtgaatggcggctgcgagggaagggagttggaggccgggagtgggaagcgaggctcatgcgggcgccaaggtggccctgggggtgacgcgaacatcagggagtcaccagggcactcgtccgtgtggcgcactcattgctcgaaatgttccagtctacaaatggtccgaagatggtgatttatttttgtaaaataaatacatactccatctccacacccatactttctcctttttctttcttttttttggcgggggagtggggaaggaaaggacatgaagcaaacagaggaagctgagaaggtggaagtggctttgctggtggtgtgggctgctttcagagagctctctcctcaggcaccacaacttggagaatgtgaatgcttgctttattttcctttcctaacaaaaggaagccttgtctgggagcattcaatcacggactctcctgaaacctcactaatatgtgttcatttctgtaggcgcgaaatcagacccgggttcattccactggccagaggcagtcttgggaggatttgtgttctggtttattcaactctgggtgcgttccttttaggtcctagtgggctggcggggctaccgcagcacctagtccctcagagcaggccagctaaggctgctggaaactgagagggacgccggctggtacaatacctgctcaggggccctgctcctgcctggccttgcgcaacggccacaagccgatctgatgccttgattctgctcaaatctcgtccctcacagtatttgcaaccctctcttgccctctaaccagcaaatggtcaccgagccggcagtcagctttctgggagtgggagatgatggggaaagaggaaagaatcgtccgctcgccggaccctggcttggagaagttctgcgctccgctgggactctgcgggccctttgcgtctacagacctatccctgccccgactaccccttcactcagaccc

SEQ ID NO: 368 - DNA, 1744 bp, Homo sapiens
aacaccatagatagcttggagaaaatgccattatcaatatgaattacttagaaacataaccccgctctcttccctgagctcatatggtacaaatcaagcacttatgtgttgaaagtgctgcatgttaaaactctggggtagcagttccctcatagtttccttgtatcctctccctcccgctggcaccattcccaggcagccaagcaggccggacttttccctggcaaccctctcgcctcaattctggcagccctgtgcgctagagtgaaccaagtgtgggctggggagtcaggtttaatttctagttttttaccatctatgtagcatgttgggcaagtcagtggtctctgggcctcagtttttatatccgtaaatggtaaaaatgttagaagtctacttcacacattttggtgagaatgtcatgaggtgtacaaaatagcagataggatattctataaatttaggtgcgctagagtgaaccaagtgtgggctggggagtcaggtttaatttctagttttttaccatctatgtagcatgttgggcaagtcagtggtctctgggcctcagtttttatatccgtaaatggtaaaaatgttagaagtctacttcacacattttggtgagaatgtcatgaggtgtacaaaatagcagataggatattctataaatttaggtgctatttctcaaatcaccttcacatctgagattttcttaactgttgtaacagtggtgacttccatttcatcactgttcatttcacagcctctcctgctctcataaaaccacagaaattgttctaagaatactgataacttatgaatatttttataggcagcagaaaaggttgatacttttaataaaatctgaccataccagctgggcgtggtggctcacacctgtaatcctagcagtttgggaggccagggcgaaggatcatgagattaggagttcaagaccagcctggccatgtactaaaagtacaaaaattagctggaaatcgctcgaacccagaaggtggagtttgcagtgagccgagatcgtgccactgcactccagcctgggcaacacagcaagactccgtctcaaaaaaaaaaaaaaaatctgaccataccctttgttaagatcaggatcagctgcaataaacaaacccaaagtaacagtcgaaatgtttatttttctctgtattagttccttagaactgctatgacaacgtgccgcaagctgggtggtttaagtcaacagatgtgttgtctgagttctgtggggtgggagtctaatattggagccatggtgctccctccctcttggtggttgctggcttccaccatctttgacttccttagcctgtagctgcataactccagcctttgccttcattgtcacgtggtgttctccttgtgccttctttacagaccattttttttctttttttttaagagacatgctggagtgcagtggcatggtcatagctcactgcagcctcaaactcctgggctctagggatcctcccaatttggcctcccaagtagctaggattacagatgcgtgctgccacacctgactaagttttagatttttgtagagatgagggcctcaccgtgttgcccaggctagtcttggactcctggcctcccaaagtgctgggattacaggcatgagccaccatgcctagcctgaccctactgcatctctaatcatatttaattagtactgcatatctttttggattaaataaaatcaatt

SEQ ID NO: 369 - DNA, 420 bp, Homo sapiens
gacagggctttgctctgttgcccaggctggagtgcagtggcgtgattgtagctcaatgcagccttgaattcctgtgttcaggcgatcctccggcttcagcctctggagtagctgggactacaggtgcatgctgccacgcccagctaatgttgcagtttttcgtaaagactggatctctgtgttacccaggctggtctcctgggctcaagcagtcctcctgccttgacctcccaaagtgctgggattacaggcatgagccaccatgtcctgaccccagtttgttttaaagccaagcgatgcaccaagatgtttgtgtgcacatctgacagtggtaatctttgggtcagggaattatagataaattttctttaaattttttctgagctttctaaaatcagctgaaaataaaaccttattttt

SEQ ID NO: 370 - DNA, 334 bp, Homo sapiens
tgctggatggaaggactctgagcctaccaaaggaagcgtatttacaaacctctaggtactgacttgttgctgaaggtcagaaatttgcaatgacatttggatgtattcaagggtggaggggcaggtttggggaaagttcttttaaagaaaaaatgcaaaatttgattacaagaagctggggtgcctcccagggcctcggaaagggcttgcacaagtgaagcaccctgaagataatgcttcattagctttacagtgaagccacctctgaatctctgtttggtgtttgtccaaaatattccaagttgaaggcaggcctgattatatgatcgcacag

SEQ ID NO: 371 - DNA, 334 bp, Homo sapiens; identical to SEQ ID NO: 370

SEQ ID NO: 372 - DNA, 470 bp, Homo sapiens
ttgttggtagaaagtttataggaaaagtgcttggaaactgttgctggtcttccttccttcctttaaccttgagataagaatgcctttgtttgagtctcaagcatgtctcaagttatgtaactcacttgtattaaaactctccctgactgttttatattcagctttctagctgccctggtttgcagctttaattgaataggtggccttgtatttatgctaattttttgtctttctctttcagatctccatgggataaccacattggtttgtttagtaaacactgagaccaactccaccatccagaggcctgacagacaaatggcctgagacagggctgggaaagttttgcttctggttgggacttcaggaagagttttgttttgttttgttttcccccaagggaacaagcccttgaatccgggaggccaaggttgcggtgaaccgagattgcgccattgcactccagcctg

SEQ ID NO: 373 - DNA, 99 bp, Homo sapiens
ggcacgatctcggctcactccaacctccacctcccaggttcaagcgattctcctgcctcagcctcctgagtagctgggattacaggcgcacaccaccac

SEQ ID NO: 374 - DNA, 99 bp, Homo sapiens; identical to SEQ ID NO: 373

SEQ ID NO: 375 - DNA, 470 bp, Homo sapiens; identical to SEQ ID NO: 372

SEQ ID NO: 376 - DNA, 527 bp, Homo sapiens
ccctctgaccacccccaacatcctggcaagtcactctcctgagtatttaggcttggagcctggagacctggctcccagtcagctggaaaagtgatcaacgcacagtgcggcttatggatccttcccacccactcaccacccacctgccagattatctgttggcaaatcccaggcctgatagcatttcctctgtcagtatttcagtgtatacctctaaacaataagggatttaagagaaaacataatcctggtaccattgttatacttgaaaaagttgcctgtgcgcagtggctcatgcccataatcccagcattgggaggccaagatagaaggatcacttgagcccaggaattcgagaccagcctgggtaacagtgagaatgtgtctctacaaaagaaaaaaaaaattagccaggcactgtggcacatgtctgtggtcccagctccttgggaggctgaggtaggaggatcacttgagtccaggaattcaagaccagcctgggcaacatagtgagactatgtctctac

SEQ ID NO: 377 - DNA, 4933 bp, Homo sapiens
gctgaatttcactgcctcctggggagacttgcactacctggggctcactggcctggaagtggtgggcaaggagggccaggcgctgcccatccacctgcaccagatctctgcttcccccagagacttaaatgagctccccgagtactctgacgactcccgggccctggacaagtaagtgtctatcagaagctttactttcatgcccactgggttttggggacattgttctgcctctgagacttcagattcagacatcaaatagaatcgcatatgtccctcccctggccaccctgtgaggtaatgtggtcaagggaaaccgaggctcaggaaaccaaggctcaggaaagagaggtgggaggtgattctccagggccacacagctggaagtgtcaggcgggatttgaaggcgggttcccatgcttccagacacagccatggtctgcattttcttctctgtgcttagcagagcgtctcgcacacagtagctgtctgtaaacctttgcagtggatggttcagagtttacacatgaatgacccaggcctcccgggggctgaaagctccctctcccctccttgaggttagaggtgatggctcaggaagcctccacaggcggtggtggctgcactttcccctgcacttgtcagatttcataagccaaggttgcgtcaagtcagtaggtggggaagcctcaaatacagcattgatccacatggacctgcagcccacagaccagcactcagttcccctgccctgcacagccagagggtctgggcgctgcttagaggtgtgaactaggggagtcagagggatgggagttcaaatcccgcctctgccccatgccaactattaggtaactttcttaacctcttcaataataacagcaatgctaataataataactgatcatatgactgccagtttttgagcacttattaaatgccaggcactgggctatgcgaagcaggtgacacatgttcatccattgaagcctcaaacagccctttgaggaagggaccattatgagccctactataccgatgtggagactgaaatatgcagaggccacctagactagtgcagtggcagagtcatgattggaacgcaggcctgtggcatacctaccatccactcacttaaccactaagttatactgtctcccctgccttggtttccttatcagtagaatgaggagtcattcccatggcatgtcacattgcagccacatcccttggcctggtgctgagctcatgcagagttggtggcaggcttctccctgcttttctataaggtggccctgaaccgtggcctcaccccctgctatcattaactgctcatgggcccctctgaccacccccaacatcctggcaagtcactctcctgagtatttaggcttggagcctggagacctggctcccagtcagctggaaaagtgatcaacgcacagtgcggcttatggatccttcccacccactcaccacccacctgccagattatctgttggcaaatcccaggcctgatagcatttcctctgtcagtatttcagtgtatacctctaaacaataagggatttaagagaaaacataatcctggtaccattgttatacttgaaaaagttgcctgtgcgcagtggctcatgcccataatcccagcattgggaggccaagatagaaggatcacttgagcccaggaattcgagaccagcctgggtaacagtgagaatgtgtctctacaaaagaaaaaaaaaattagccaggcactgtggcacatgtctgtggtcccagctccttgggaggctgaggtaggaggatcacttgagtccaggaattcaagaccagcctgggcaacatagtgagactatgtctctacaaaaaaaaataaaaaataaaaaataaataaaaaaaagtagccaggtactgtggcatgtccctgtagtcccagctacttgggaggctgaggtagaaggattgcttgagcccaggaattcaagaccagcctgggcaacatagtgagattgtgtctctaaaaaaaaaaaaaaaaaaaaaaaaaatagccaggcattgtggcatgtgcttgtagtaccagctactcagatgctgaggtgggaggatcacttgagcccaggagttcaaggctgcagtgagccgtgattgtgccactacattccagcctgggcaacagagcgggaccctgtctcaacacaaaaaaaaaaaaaaaaaaagaaagaaagaaaaagttaacaatgatttcttaaattaccagatatctagcagattcatagtccccacacccaccctttttaacagtttgctcatttgatttgagatccagataaggtctatgtgttgtgattggttgctatgtctcttaagcctctctaggttctctttcccctttttccatttttttcttgtaaattacctgttgaagaaaccaggtggacctgaattttactggctgcatctctatggtattgtttagtctgctccttgctcccctgtatttctagtacattgttaattagatctagaggcctgatcagattgaggtttgactactagggcaagatggccctggggacatacagaatagaatgtctggttgccaggctctttgtgatgttggaagccagtcatgctggcgaagtccattaattcattaggggttgaaaaatggtggtattttcacctactattcttttttaaatttatttgctgaaataactgcaataaagagagaatttccctcaattatttggctactctgtggtgaaattcagatgggaaaggcagcctaagtgttggattctctcccctccttttctttttggctttccaaataactgtttctctagcatcgtctaaaacgtgtgtttctttttagggattattatgaactcatggattttaaacatacagtactgcatttgaagagtcaattctttgcagtgtttatcctgattgatgtttaaatcattccctcttggatgctgggaagtcctgaatccttttaaacggtcacctttcttgccttctgatgtgacagatgcttcaggctcatctggtttatttcttgtcccagacctggcatcagccatttctccaagaagccctggttccttttagtgggtaatggtatttagagaccataatctggccactagggatgctcactgctacttggtccgttgctgtttctaggcttttttatggatagagctaggaattcatttagatgttcttgagagtgtctgtggagtcttcctttcactgtcggctacaaatgctccagcagttctctctgctctcagaattgggcaggtttgctatggagcagccccatttctaggacagaaacataattgcctttagaaggaaatagaaggttctctagtggtcatcctcagtcagcttagttccacagacactccagtgtggaattgctgaatttcctcagttttaagatgccagcaattgtcagacacaccatccatcaatttaataacagccttttagggaacaaagaaacattgcctccttgggtaaacacttcgattatgagattttttttttttccaaattcacaactttaaaatgtaaaaggaaacaaaaagtttcttttcaaatctaggaaatgtggcagcaggccaagtttctcccagtacagcagctgtgaggtaccaggaatccagggtgtggagtggggaaggttctagaaaatgggagggagagggaggttgctcaaaaggctgccagctgggcccttttttccaggaccaggcttctgaatggcagtgccagacacgtgggccagagccacgaggacaagggcctgaggcctgggctgaggcatgctgggcagtccggggaagcgagaggcacgattgtccttgggacaaacacaggcccacttgaggatgaacaggatgtcccaagcaagggaaccagaaactggccaggacaggagtgcgatagggctgaggtgacaagctcagagtgccagctgggaagagcatgaggggctccctcctacaggttagaggcttccctgggatatccaggccatgcggtcacagagcatggtccagccagagcagctcccacagtcacctgcccctccttctacttgttccaagccaagagctgcagagctcacctggtgcttttgtacctctctcccccagcatgggaaggaagggctacacttctttccaactatgctgtaaagccaacacagcaaatttacagaaagtttggaaacttgagaaaaatactcacctccataccctctgacccaattatgtttttcacttttgcacactctctcctggtccttgtcctcatttctcagctttataatcagtgtcctgcctcctccatgtgactgcagtgtcctcatgatggcaccttaacccctgtgaaatttacttaaccatttcctgattttgagatcttttaggttgttatccttttttaagctattgtaaataacactgtaatgagcatcttggttcggatagcctttcccatatattgaatacattttccttctggggaagaaaatcccagaaatgggatcactgggctaaaggattctgaaaaatggttcattttcccttttaaaaaaaaaacaaaaaccctgatgattgcttttctgcacctttaacagcatagccttttttttttcttttaaaaaatgtctcatttcatagatgagagacgacttctgactgttgttctcagcagtcacacctccccttaacaagcctgacacagccaggctagtgccaggcagtggggacgtacttggggccgagggggtgggggccccactgtgatgcctcctgtgcccactgagccgcccccctgccgctccgtccccattgctgcaggttaattgatggcaccaacatcaccatggaggatgagcatatgt

SEQ ID NO: 378 - DNA, 492 bp, Homo sapiens
ggaccagcagctgaatgacctaggacatcttcacccacccgtctggcagtggggaggctgctggccagagagacaggtgtctgggttagctgggctgcctcgcatggcagtctcaagccccgagtgctttacaggctctgcttgcctcacgtgggcttctgtcccagtgttcaaagcaaatcacgtgacccagagtcaggagcagagaaggaaactccaactctggatgggatgaggggcaaaatcacattgcaacagcagggacacgggatgggacgagcttgtagccactttgcacgtgaatgatgcggcgagaagcccatgtgcagggtgccgtgctggccacatgtttttttcatctgccccagagatgctcagagttaccttggcaccacgaaggaggaaaaggatctgagggctaagttacaaaaagtatgttgggagatgtcaggggcgtgggagagaaaaccaagctccagggaggtcaggtga

SEQ ID NO: 379 - DNA, 3428 bp, Homo sapiens
ttcttttttctgtgatgggctattccatctaccgatatatccacgttggcaaagagaaacacccagcaaatttggtgagtacttggtgtggcagggttctttattataatagtacacctccaggaggacagaagaggaggttctagaacagattcagttccctttaagggcagagtgaatttaaagttaaatagctggtgaattaaaaaacagtttctgggctgggcatggtggctcacgcctgtaatcccagcactttgggtggccgaggcagttggatcacttgaggtcagaagttcaagaccagcctggccaacagtgtgaaaccccatctctactaaaaatgcaaaaattagctggatgtggtaatgcatgcctataatcccagctactcgggaggctgagacaggagagtcacttgaacccgggagaccaagattgcagcaagctgagactgtgccactacactccagcctgggtgacagagtgaggctctgaggctctgtctcaaaaaaaaaaaaaaaaaaaaacgctttttggattagctgactaacagaacattttccttagctttgaaaagatgttctatttaaccaccagattatacaaggtcccacagataaattcaatcatgatcccttgccctgcccttctagaagttcaagcctagtcgaggactagaatttcaaaataacacatgaaggctaagatgagagcaggcgctgggaattctgggggtacaaggagggccccaaaaccctacacaggggctcagctctcatgccagggcttggctatgagaggtgagtaggagttaggatccgtagtgcaggcagaagaaacagcaaggtggatgtgtggaaactgcatgacacccctaaacaaggaggctccagatgaggagctagagaagaagatgagactggagagtaggcagtgggtccaagtaaggggagagctggggtgctgttctaaggagctaggcctcattctactggcaaagagaaatctccatagggttttaggttaggagcatcatagtcagtatcaaggtttagatccaaccagatattagttccaggaaaacttagagcggagtaagactagaaacaagaaaagcacctagggaactgtagctttgtccaggggagagaagattcaagtctaacaggcaagagtgggatatcagtctagagagaaagacatggaatggaaacacacttaggaggaacatggccatgacttaatccttcacagtaagaagaagcaagaaagaagaaagaattaaacccacagaggtgggacaatgtgctgaagggttctgaagggctgagcatatttttaacaatcaaaaccattttcttgagaactattaaaagatgtgttcacgtgtacatgataacataccttgtttcctgttagttcagtttataagtttttctatgattctgcctgcattcaggtttcagagttggcttcttaatggcattgggagaccttttctggaaggaacattcacaggagaattgaccacctgtgatttttttgaaacttaaaatgttgtaaaagattgaggctgaaggttctgttttgtaaagttaaatgaaatcacatggtagagtgacaatgaggattgtaactcatgctctcttagataacaggtatctttcatggtacccacagcaatattttaatctcatctgagcttccttgacatgatttagagtttctctgtctaccgtaaactggcagatgaatttccttttttggctctattatagcatgataagaatggtgtaaggggtaaaaaccatccctgctcatatatttccctccttttctacatccagttctcatgcctgtctgcatttcaagtatatccaaaaacagggcaggtagcccaggtaaccacagcttattaacaagtgcatagcaaactataaataaaacagtgtcacaaactctgccacacccagtctttgctactcttcatgtggctgagattctgactttacagaatgtaaaaaaggtcaagaaatgaagcaactcctctgccagttagaagagggggcaccaacgccccagccccagccctggactggagaaatacccacccagcgaatcacttctcgcttccaactatcttttgtgtgtcttgggtctcttgcctcccagtgagtgaggttttctgtatattgcaagcataactttcatttacatgagttggtaagagtaggtctttaaaactgtctggtgacaagatattctacctaacagctgtttttaatgtctctctaaagtgaaaaggtgaaaatcattctcttttctctttatagattttgatttatggaaatgaatttgacaaaagattctttgtgcctgctgaaaaaatcgtgattaactttatcaccctcaatatctcggatgattctaaaatttctcatcaggatatgagtttactgggaaaaagcagtgatgtatccagccttaatgatcctcagcccagcgggaacctgaggccccctcaggaggaagaggaggtgaaacatttagggtatgcttcgcatttgatggaaattttttgtgactctgaagaaaacacggaaggtacttctctcacccagcaagagtccctcagcagaacaatacccccggataaaacagtcattgaatatgaatatgatgtcagaaccactgacatttgtgcggggcctgaagagcaggagctcagtttgcaggaggaggtgtccacacaaggaacattattggagtcgcaggcagcgttggcagtcttgggcccgcaaacgttacagtactcatacacccctcagctccaagacttagaccccctggcgcaggagcacacagactcggaggaggggccggaggaagagccatcgacgaccctggtcgactgggatccccaaactggcaggctgtgtattccttcgctgtccagcttcgaccaggattcagagggctgcgagccttctgagggggatgggctcggagaggagggtcttctatctagactctatgaggagccggctccagacaggccaccaggagaaaatgaaacctatctcatgcaattcatggaggaatgggggttatatgtgcagatggaaaactgatgccaacacttccttttgccttttgtttcctgtgcaaacaagtgagtcacccctttgatcccagccataaagtacctgggatgaaagaagttttttccagtttgtcagtgtctgtgagaattacttatttcttttctctattctcatagcacgtgtgtgattggttcatgcatgtaggtctcttaacaatgatggtgggcctctggagtccaggggctggccggttgttctatgcagagaaagcagtcaataaatgtttgccagactgggtgcagaatttattcaggtgggtgt

SEQ ID NO: 380 - DNA, 851 bp, Homo sapiens
cattttataatagaatattacatttatttctggaagtgtgttttcaaaaagatatttacatagtctgtaaactagaaagtgttaggtaaagctctaggttactgtgttactattataatattaaacattcgaataggcagtcgttcaaagactctttggaatatctatgaatgaatatcctctattcttataatattaaaacccataagtaaatataggacatacaagagaaatgagttaaatgactatgtaagggagagtttattaaaatttgatgaaatttactgtaggaactaaactatgccataaaacaatagctttctagttcatttccagtaactgttcccatctcctttaccacttgttaagaaaattaaattcttcagtcacgctgctttaaaatgggacaaaatctattaagttgaaccatatataattgtggatatttggctgtttttaatctgacaagcagtaacttcatatggtttgccttaatatatatttgttttagtcatgaactcataatccattgatgctctttcatgagaagagatatcacccatatttccttattgatattattggtacaggcagacaaccctggtaggagagatggattctggggtcatgacctttcgtgattatccgcaaatgcaaacagtttcagatctaatggtttaatttagggagtaattatattaatcagagtgttctgttattctcaatctttatagaaacgattctgctggttttgaagaacagatgtattacactaactgtaaaagtagttcaagagtgagaaagaataaattgttattaagagcaaaagaaaaataaagtgattgatgata

SEQ ID NO: 381 - DNA, 1491 bp, Homo sapiens
ccaaggacaccattcccagagaagactgctagaggacaggatgaggtgggcacaaggaagatgagattaggggtgaaagcctgatgatctgccaaagcatgggacaggaaggcagaaacgtaagtggaatgtagcatgaccctagcagccggaagaaacagttgaatctctcaaggaacttctcaagtgtagtgatggtggctgctcaggcttgagtccctcaccagcccagccagaccatagtttacagagagctaaaccagcaacctcaacagaacatgttgtcaaatgatcctgtctaaaaactgttgattaatgagctgatgtcagccagatggaaggttatgaaagcatggtgtcaccaggttgccctaggacctatttgtaatattcccttacagaaagcttacacctggaaatgtaagaaatgtgggaaggcaatttattcagggtaaaggccttggaagactaaagaattaaagaattcatactgctgaaaactctatttatccttttaatgtttttttttttttactttaaattttagggtacaatgtgcaggttagttacatatgtatacatgtgccatgttggtgtgctgagcccatcaactcgtcatttaacattaagtatatctcctaatgctatccctccccactcccccctcaccacaacaggccccaatgtgtgatgttccccttcctgtgtccatgtgttctcattgttcagttcccacctatgagtgagaacatacggtgtttggttttttgtccttgcaatagtttgctgagaatgatggtttccagcttcatccatgtctctacaaaagacatgaactcatcattttttatggctgcatagtattccatggtatatatgtgccacattttcttaatccagtctatcattgttggacatttgggttggttccaagtctttgctattgtgaatagtgccacaataaacatacgtgtatatgtgtctttatagcagcatgttttataatcctttgggtatatatccagtaatgggattgctgggtgaaatggtcaaatggtatttatatctcaagattcctgaggaatcaccacaccgacttccacaatggttgaactagtttacagtcccaccaacagtgtaaaagtgttcctatctctccacatcctctccagcacctgttgtttcctgactttttaatgatcgccattctaactggtgtgagatggtatctcattgtggttttgatttgcatttctctgatggccagtgatgatgagcattttttcatgtgtcttttggctacataaatgtcttcttttgagaagtgtctgttcatatccttcgcccactttttgatggggctgtttttttcttgtagatttgtttgagttcattgtagattctggatattagccctttgtcagatgagcagattgcaaacattctctcccattctgtaggttgcctgttcactctgatggtagtttctta

SEQ ID NO: 382 - DNA, 110 bp, Homo sapiens
tgtttctgctctttattacttctttctttctgcttattttggatttagtttgctcatttttttctgttttcttaaggtagaagcttagatcattgccttgagatgtttct

SEQ ID NO: 383 - DNA, 14273 bp, Homo sapiens
agggagggaaaagtaaagatgcaccttcatgggatcctgttgctctgaaactcccagagcggaatactccaagaaactctcattgccacctttccaacagccctagagcaatagagcacgcctatcaatatggaggaacagccaacagccgccaagagtttgaacacttaaaaggagattttggtgccaagtaaagtaacacactatactcctagactcctaatgacatggctgggctccatctttgtttgtcacatgtcatcgttttttcccatctttcctttctgtgccaccttaatcctattatgttatcaccaaaataaacactaaatagtacatgatttatgctatcaaaagaattatattctctgtgactttccaattgtaaggttcataaaacagtattcttccaggatactgtatttgatcaaaaagaaaagacaatcaaggaaaggaagatggagcaagtttcaaatgactcatcatctaacattgatatccccctccctctcccatacaaattgctttcagattgtaaatgggagtgcatttgaactgctaaaaggttaataaggaaaggcattgaaaatacaaatatgcttgtatgtctatgaccctccagctatctccaaccccatcgcctctttccagtatttcacaaatctccaggttatctgatattactgaagaattatttttacagttttagcacccaaatatttttatataggtcttacatagctctgtcaaacattcatagaggcaaagtattcaataagaaatctctaataccttataatttgctacctgcctaataggcagaatcagtattttgtattttccaggaagaatttagagttaatcaaactagaagttaacctaataaatgtatcttatccatagcctggggctaaatttctagaaggttttgtttaatttctacacgctcgggtggctgctttttacatgtggtatccattaattaatttttactgggaaaaaattttagtctgtgttttagatagtgcacaactgatattatttgtattattcactagtattttgtccacatggataagcttctttaacatacatatttttactaaattgcagcctttttttttttgagacaaggtcttgcttgctctgtcacccaggctggagggcagtggcatgatcatggctcactgtggcctcaacctcccaggctcaagtgatcttcccaccttagcctcccaagtagctgggactacaggtgcgcaccaccatccctgg[452 bp omitted]ccagatctcagttttccattcgtctgagaactcgttcctcccatggcatgatcttctatgtctcagatcaagaagagaatgacttcatgactctatttttggcccatggccgcttggtttacatgtttaatgttggtcacaaaaaactgaagattagaagccaggagaaatacaatgatggcctgtggcatgatgtaagttgaaggcagagaacagcattaccagcaaatagctaccattgtcaaatggacactaatgggcctccattactctctctagaaatatccattttaaaattctgctgctgcacactcagaattcaatttcaaaaaattgtattccttataaaagtcttgaagcatactatttaaaaagagacacaggctgagcgtaattatttaaaccaaaggatcagtggtcaacataaactgaaatttggtttttaatgatttctcacttattttctactgccaataggtttttacttttcagcaattattattgagtgtcttttattggctaagctgtggaagatacaaagtgaagagtaaatcagtgaggaagataggataccacagtgggagcagataaatattgaaagaaattggtgggtatgtaatgtcaagagtaagcaatgtaacatgcattacaagtaatcacaagaagtttaactgggagagaacatatggcctgttctgtctatatgtggcctggttaactgggaaaagcttcatagagaacatggaaaaacataagctatattcagaaattaagctttaaatcattctatctagaggtcagaaaatacatagatcacttcctctaatacctgaagtggtaaatggaagatgatcatgaaaaaaatacacctatgcatataaagcaaaggggcctggagacagctcacaataaaggcatatgctgtataacaaaacagaatcaaatgagggataaagtttctgccattccaaaaactgcattgccagaagcctactaaacagaagagataaactcctgaccttcagagatggggccattttaaaaataaactttctgaagatttcccacagcattgcaatagcaaagttggaagaagaggaaacacagccttttctgcaatcttggaatgtacctgagatgtgctattgtccttctcttcatccaggtgatatttattcgagaaaggagcagtggccgactggtaattgatggtctccgagtcctagaagaaagtcttcctcctactgaagctacctggaaaatcaagggtcccatttatttgggaggtgtggctcctggaaaggctgtgaaaaatgttcaggtaagccaggcatgaccaggtagagccattgaccattagagccagaagatcatctaattgaggccctcgtctcacagattaggaaactagaaactagcaccagtaaaactgtagttttctggaaatgggatatcaaagtaagtactgtcttatgggctgcctgtctgccctgtggcattacaaagtcagaagtaatctttcaattctaaggtagatgtcaaatgaaaaagtttcagaggcataaattatcatgaaaatttatgtctcaaggagatcttatttgttcaggaagtacccatacttttaatgtaaagacataacaaaaaagaaagcaaatcattgcattatacattattgagtgaaaaaaaaagtttcaggtcattatgcaaactacaatcccatttttcttacacacacacacacacacacacacatacacacacacacacacaatttgtaaatgtataaggaaatgtggttgccctggggagaagtgagaatatagtagaaaaatattatttgtgtaatttaaaaattaaaaatattgcacttataaaaaatttagcaataaaaggaatgcatcaaaggactaaatttttcttaacataaatataggttggattttagcaatgttaaaaataatttctaagacctattaatatatgtagatgaagcaaaaaagatggtttacattataattagattttagataagcagccccaattccatggcaatctcttttttaaaatgtccaaatgcaggacaaaatcagttatcttaagtggcccaagtttcatgtcctgtgatatgataaattctcaaccacaaaaacagctcatgaaaccagaaatgaaagctttctgctgtttatttggctatggtagatttaagtaaagaactttgctagccctcatcagccttaggtgatcttggcacagctgtcattcttgagggaaaactaggatacttctaaatatgcagtttgaaaaccacagctgcaacttattgtgtcaaagtgtaacataaaaatgtccatagcttaattactacaggttgacattatcaaatacaaaattccagcttcaaacaaccagttagaaagcaactatccaggaaagtactgatcattcagatatctgaaataaatgaaacaaggaattacgtgggttccttcaggactcaaaccccctcattttgcttccccttggtgcatttgtgttgagaaaattgattttaagaaatatcttcttccctcagattaactccatctacagttttagtggctgtctcagcaatctccagctcaatggggcctccatcacctctgcttctcagacattcagtgtgaccccttgctttgaaggccccatggaaacaggaacttacttttcaacagaaggaggatacgtggttctaggtaacattagtcatgttaaaaatatgagtcatgaaatgcttcttcctggagatggctaacagggaatatcaggcccagagttaaaacttaagaatgccaaactcagccctagaagatgacctcttcccacaagaaccacctttctccctcctgcactccaaaccatacatgcagtccccatccctgtatactctccctgaccaggcttctccacagctgccaaacttctggatgaagaccacctgggctcctttagaatgtctatgctgctccgtggcctgatccatgtcagtttttggccaccttgctcctcaaggtcttgctctgctccttcttggcatgaaccattgtcctactaaaggaagtcccactttctccccatgacttgcaacaccagcagacaacgttatccttcagaaatttttatttctggctttttattattctccttgaccattactccctcactcattcagtttttattgtatgcctcccataaggcagtccctatgccagatgatgggacataacagttctaaaaataaataaaatcctagcagactacacacaatcatcatctaattcattccaagaatattctatggagcaatcgctgggtgtgaggaagacaccagaataagtgcccggaattaggataggaaagggtataaagctgcatgttccctcctctcaaggcacttaggtactttgcacatcccctgaataaagaaattacactgcagccaagtttactttttaaaccaccaccatatccagcagaacacccagaggtagtatttcctctctgcttagctcatgattttactttcctgcctcacccatctttacccctacactaaaacacctacacttacaattctcagcctttcatggaatttcagtgataagaactcttaacagtttggacagctgggaatacagagcaaactgcacaatttatatactactccatgagcactaactaataacaggaaaaaattttaaatgatttataggatacattaaatgaacattatttagatgccctggtttgcaatgagtctcttggagtaaacacaactattcttaataagaattttattggatcacctcagtaacagctcctaaatactttctctgctctttctcctctgaaatgctgtacaacactggcaccagttaggtttctgtttaataattattttaaaatacaggtccgatcaagacagctgtcttgctcagtgactgtaaaataaagcctaacttccatacttcaccactagagcccttcccagtgtggctcccactcaccatgcctccttctcccctggcagggacagtccagccacagtggccttcacagtgctctccaagcattccagcctctgtacctgtgttgagtctacttcctctgcccagattgccctgtcctcctcacttgtgaaatactcagtagtgctgctgctacttggaattaatttctcctcccctgagctcccataacacatattttgtgtgctgttgccagcctcacaccccacaacaggattgatgcattagttatcttggttccccacagagctttccacagtgagtttgacatggaaaagccactttctacttatctgttaaaaaatgcatcaaactttcaaaaacagataaaaatatatataattacaaaatcacaccatagttacaaatatgatcttgctgttcttgggagtttatagtgtttctctccacagatgaatctttcaatattggattgaagtttgaaattgcatttgaagtccgtcccagaagcagttccggaaccctggtccacggccacagtgtcaatggggagtacctaaatgttcacatgaaaaatggacaggtagtgtctgaaaaatgtttaacaatttgtctcatctgaccttggattctagatctgaagcagatttatttcacagaattatttcatcaatctttcctaactgaaaagaaatataggaaagctataacatgaaatgtaaatgtgggcaatatttggattcagcttcctatgttgaaagttgatttggttaaaacaaagagtcataaaaatatggcaaaactatcaaaaaaatcactaataacaacacagttttaagagaagaatgagaagaactttttttcaccaaatggaatcagcaaacataactatcaaaatcaacaaacactaaaacatctttctaaatatctataatatgtatgtatatcagatatatgtatgtgtactagatatgtatatatactatacatattattctcaattgatagaaataaaaaattatgttgtaatgccactttcatcctaagatactactaaagaatattcatggaagtattcaaataaatattaagaaaaaagtatattttcattgatgctgctaacttaacataacagatttttatttgggttctagtacattctattaaattatattgagccatcacaataaaatgtatccctacttggtgtttactatttgttgggtactattctaagctttacctagattaactcatttaatcctcccaattatctccatgatgtaggtaacagtatcgcttataatttacaaacgagaaaactggggcagagagtaagttaaataggagactggctgtctagcttcaaagtccatgttcttcaccaatacttcaacctgctttgtataacacactcaatctttagaaattaaagggatttattctatttcttattgtccctctctcgcaattttctcccctatgaagtcactttgttctctccccaaagagcacccccagttgaacctatttctataggctgccaaagacccttgtgttcaaattgcaaagctaatcatgtgtgaatatttgttgaagtattgcttcactgtggtaaattatttaagaaattcagttttatcacaatgaggacaaactaaatcatacaatgtgtcctatcttttgcaggtcatagtgaaagtcaataatggcatcagagatttttccacctcagttacacccaagcagagtctctgtgatggcagatggcacagaattacaggtgagaaaactgactgccctggggagcctgcacacccaactgtaagattatgatctggcagaacttaggctatcacttatatgataggtaatgcatgacagtctaaaagtatccaagaaaagaaaatcatgttattatactattatgtgtatactgaatccacatgtgatttcaaaatatgaacgctgcaaaattgtgttaaggggttgcttcaataatgcataacttatagggcaaaaaaaagtagcacaagaatattctaaatattctccctttctaaggaaaatgttacagtaatctcttggttagacattgttagacatcattgatgattttaataatatagaagaaagtgtgggttttattctggaataaataaaagcaattgctgtgataaatagtctttctcaggttaaaaattcatcactccagtgccacttatgaccagtctttgccctgcatttcagttattagagattctaatgtggttcagttggatgtggactctgaagtgaaccatgtggttggacccctgaatccaaaaccaattgatcacagggagcctgtgtttgttggaggtgttccaggtaagtgttgtttaaaaaggaaaagttcccaatccaaaaaactgagttctcacaattgttattgtagaattgagccatgtgtttttatgatgcacctagttactcaaaggattttatatacagtgttgtttaaatggaaaaggcataataaagtgacatgtaagaactagaccccagcattccagccagtggctattactctcccttgccatatttgcttatttttttctttcctttcccttttaagtgcccgccacacacatacacacagtgacacacatactcttattttatctctaacacaaagaaaactcattgactaacactacagtaggatctgagaactttggaggattaagtttgctgttagttgctccccttcctcagtaggaaaaaatgcacagttcggtccatgattagtctgaactgcaaaaacagctgcagaccataagttgttgtccattggtagtgacattccctcagagaggttcccagctgcaattctgtaaacatcatcagtcactgctgctgtcatctgccaagaatggtgtataatcccggatggtgacaggacacttatggacaacacacaaacaccccaattgttttaaacctgtgaagcaaggaccatgtcctcatattgaatgcatttgtttttacacatttcactaacttggaaaacctgaatgctatggctggggagtgggatttaaaagggaaataacccagcttttgcagctggaacttggtggggagtttttaattgacatatcatagttgtacatattttgggggtacatgtgatattttgatacctgtatacaatgtgtaatgatcaaatcaggataattgcaatatccaccacctaaaacatttatcttttctttgtgttggtaacattacaattcttctcttctagctattttgaaatgcacaataaattatccttaactataatttccctattgtactatgaaattctagaaattattccttctatctaactgtatttttgtatccattaaccaagttattttcatctccttcttcccccttcccttcccagcctctagtaactaccaactactctctacctctctccatgagatttacttcttaagctcatgtatgtgagtgaggacacatgatatttgtctttctgtgcttggcttggtggagattttaataatcttctaatagattatttttaaactgacccataaagacagacaatgctttaaagaagagagcaagaagcacagataaaattaagcatctgaccttgggtactccaaaaatagtaacaactaagcactcttctttgtctgaatttttcaaatactagtattgacaataatagtaacccggtgtgaaaaaaaatatttgagaccctcgcaaagcaactcttctcctttgtctcctgcttccactcccctctccattccccagtcctctccctgttcctgacttcagctttgaaaggattctggcaaaggccagcactgcacttcatgcaggtgcagcatgaaaaagtctcacatgagtgcatatttctgcacattgcttccctccagaaatcacaacacagtttaaaatgtttcacaggttcccaagagcctccaggattaaattcaccatagcatgcaagctccctgatcatctgtctcctccttgtccctgccttcgggatctccccacaccttctgggacttgcagttcctaaatgttcaacgatggtatctttgctccgggcctttccataagggaactgggcctcaatttctgggaaatgttcttcctttcctcccctagtacctttgttaagaaacaacttctcctattcctccccattctaactcctattgacctttaggactcagctcagacttttacttacaacacgcccctttccccctaggatgtatacacatactgctgttgtagcacttagcacagaatattgttgaaactaagaagtgcattccttgatggcagggaacatgactatatccaacacacagcatggattgtctattaagcattgtgctaggctttgggaggtggacaaaacaagcatggccctccctcatggaagttggagtatttgtccttcactatgccacccaacgtacttactacatctttcaaacagatatttctctttggtttttgtttgtttgtttgctttcacagtctgatcccagcctcacacactgccatcatccctcactacaagagttgctaagccctacagactggacaggcaagatgtacctaaagccaaattcagcctgcctgaaacacagaatgaatagcaaactttagttaatgagccagcacaggagctagcaggccagaagggcgtaaccaccagcccactgcaccactgcagcttttaagtccatctaagaattatgccagcaagcctagaataaaagcaactatactttaagatgaaatgtaattaattatatcattttgagctgttcaagattaattccactaaaatcacatcagaaaccaggcattaagaggatagctaaagaaattaggctaaataaaacccctaaatgcactgaattctccaagaataccactcagaactctggtgactcattatttctatccataaaaagctaacgcataaaattcctagaactacacaccaaaaaagtcaactttagtgtgtgatagttttaaaatcaaaattaaaaatcaaagaattttttttctgccggacatggtggctcgcgcctgtaatcctagcactttgggaggccaaggtgggtggatcacttgagctcaggaggtggaaaccagcctggccaacatggcaaaaccccatctctattaaagatacaaaaaatagctgagtgtggtggtgagtgcctgtaatccctccagctactcaggaggctgaggcagcggaatcgcttgaacccaggaactggagactatagtgagcacagatcacaccgctgcactctagcctgggccacaaagtgagactctgtctcaaaataataataataataaaataaaaaggttttgttaatgtagcccacccatgggtctaaccattcattcctctactgaaaatcctgcattatttgtatatagtcaagcattcaacctgggaaacattctctctaaaaattatgcattaatttcattaatcaattacttaggatcctagggcactgtactgtcactacctacaattaattgtatggtgaattattcagaccactaactgctacatgaattattacctccagatgatttccctcataagccaaaggatggtaagcttgggcagaatcaaaacctaagttctaagtcaggtctccaaagtaagcagaagtattagatgtttctacctcttataagcattcctgttcactcatttcttacccaaatgatgaagtacactgagcaggcttgaagaatagtcacactaatctagagacaataaagggaattgatctctcaggccccttccaaatctaaaacttttatgattatcattctaaatataaaatgctatttccatgatttattttcagtacacagcttctgcatattcttaccctacattgcttagaaaacttattacagctgcttgctgatgtttcatttgctgttctatgttctttcctgaattactgatttctaagtgttttccatcctttatctgctactgctcacatagctgtttgtaaataataataagctttggctaaatggattttaattttatatttctaagctctctaaatcgctttaaattatattgcttctatcatcctaacacatttaattgtgtctgtacaattaataagcataaggcttcttctagatttctaattaagaggagaaagttcccttggcataccacagggcacttgtgcccacacaaagactaagcgagttatcattaccctatttatagttcttaaaccctgagctcagaaaaattgaatcttagtttattcgaattcattactttctcattatattttatgaacaggcaaaaatgtagaggcttaagggtgaagggtaatgaattaaacagaaatattaaccaagtccaaaaatagtgtggaagctaaaatttctttcctccttcttagcaaagtacacattataagtgaggcccaggtgaaattaactttaaaaaacataggtagatcatgaaaattcactgctgaggctttacatgtaagtggtaaatttcagccttgaaagacagctacaatacacagaaatgtgatcatggaaaacatggcaaaacgttaaaattaccacatgtccataggacttcacaagcaaataatgttactgagaaatgagtcaattataactatgttctatttttgaaatgtaaatcatattgatgatatgagcaaatatgtatacttttaccaggaagtaatatttgggcttggaatacctcaattgcaatctttgtttttatttcttgctcttttcagaatctctactgacaccacgcttggcccccagcaaacccttcacaggctgcatacgccactttgtgattgatggacacccagtgagcttcagtaaagcagccctggtcagcggcgccgtaagcatcaactcctgtccagcagcctgacatgacagagcacagctgcccaaatacaaagttctttagagcactgaaagaaacacaaagccagccaggaggaacagtaactcttccttcgggtggaagctttcatcgagttgaacaggacttaaacgaatcatcagggaccggatatttcttatttctcatttggattcttaaccttgaatccaaagtgtctgcaatggacaacaattgaaggagtggcaaacttacttgtattgagagcacacgcaattcctactggtgaaattactgtttctgtttctaataaaatagaagggattccaaataaacacttgcacacatttttgaagtgcggctagattctcagattcacctttcttccagggaagataactttcaatctatataaaaatctctgtcctaaaactacctttctttattttgaagagacttactaacttacatataatctaaattagatgatagatttgtttttagcccttttgtttggtctatcagtataagaagaatattttaggtttatagctgaagttatcaaggtttaataaagtaaatttctaacagaatactagaaaaatgcagtataatttaattttttctaaataagaaacacaggaaatcaactactttttccccttccttatctccttaaaagaaaaataaaattgtacatgagaggaggcttctgtaggttattattaccattattgtgtgttctatgggaatcattgaggatatcacagcaaaaacagtaggacaaaatcataaaattcaatttaagagtacacaagtccttttattaaaagtttgctcctagcctgggcaacataatgagatcccatctctgcaaaaaaatttgtacatgggcatacacctgtagtcccagctacttgggaggctgagacgggaggatcgcttaagctcaggagttcaaggctgcagtgagctatgactgctgactgtacctgcactccagcctgggcaacagagtgagatcctgtctcaaaaacaaagtgtgctctccacatacctgcaacacaactagtcttatttctaaaatgttataatcttttttccaagtagctacattaatatagtctagaaaaaaatggacttgaatagctggtagaatattaaaatatagaaatgaaataaaagaattatatctaaaaacctcaactcagaagacagaaaaagagaaaataggccctgatatcaacagaattaacaatacataaaaggagtaacttttgaggggagaggatataaaatattttgaggaattaccaaggggaataaaacaatgttaccttgaaatgattatatatatattacatattggtatatatgtccatacctacctatatcccctgctacccttctgtctgaaatatacaaataatgataatgttgaagatatcgataaacatagctaatgtctgttcatagaggacttactaagtgccagccaccatgataagctaaagttaattattttatttgttc

SEQ ID NO: 384 - DNA, 5379 bp, Homo sapiens
gtttcctgatttacaccacatccagatggtgctgagaggatatgaacaggcgagagaagtaacaaggatctcatccattcttgcttcactcaccacttcctttttctcagaggtcaatgcctgatgccaggtccactcactgaaattccataaagactggaatttgttgccttggagcatgtatatacattctcttgttattctcctcccagttcctcatcaggaccttctgttgcttctaatagttaacctctttaaatagcacagtttccctcttctgaaagtaaagttgcagtagggttctgatggcattaatattttaaaagaacttgtgattttgtttacttaaaagtgagggatgtgaacagatgtcgactcaacctgagaaagaaggtatttgttctagtgactaaatttataaatgagattcagagccacttgattaatagaagatatttactttgaaaaatacagcgagacacactaaaaaaattgaccttttgcagtacttttcattggattgcttcataatttcttggtgttggaaaattaattcctaaagcacaagattaaaggatgcttgggtaagcaattagtttacctgtcttttctgggaccttacacggttcatccatgattgcattttcttttagaattggagtttaatgaataaaaactttaatataatctactgattctttatctcactaaggtgaaacactcttatcttacagaaatatttccccttttctttgcttttaggttggcattgcaaatggtatggtcaccgaacaggctacaaagaatgccctttctttatcaaagacaaccaaaagttacaacagttcagagtagtaagtaaaaccatacaatgtcattttaccttaatcagagatggtgaatattaattaatccgatagtcaccagcgaactgaatgttcacataaattacattcccagaagccttttggccaaagcgtctgctgttaactatacctctgttaaattgcatttgtaagacaaatttagctctttaagaaaaaaactaacatttataaacgtgttctttgcttatacattgggacagtgattctttttctgaagaagacattgttccctattcaactcccctttttaaaatttattatataaaaagtcatgtctcataactaaaatcagagttttagtttcccagtctttttttttttttttttttttttttttgagacagagtctcgctctgtcacccaggctggagtgcagtggtgccatctttgctcactgcaaactccaccttccaggttcacgccattctcctgcctcagcctcccaagtagctgagactacaggcacccgccaccatgcccagctaattttttgtatttttagtagagatgggatttcaccatggtctcgatctcctgacctcgtgatccacccgcctcggcctcccaaagtgctgggattacaggcgtgagccactgcgcctggcctagttttccagcctttaaagagtagatgtctgtctattataagctagaattgtgtatatttcctcttaaatgacagttagacagatctatcattagcatcatctatctatcattccccgctttaacatagagtcacctcccagaggtgttaattcactgttcagtaactactgccaagtgaaatatgctgccttgtggatctactgaagtgatcagcatacacttgtcccttggtatccatggggaattggatcccagtatcccctgggataccaaaatccacaggtgctcaaagtccctcatataaaatggtataggctgggtgcagtggctcaacgcctgtaatcccagcagtttaggaggcctaggcaggtggatcacctgaggtcaggagtttgagactagcctggccaacatggtgaaaccccagctctactaaatatacaaaaattaggctgggcacggtggctcacgcctgtaatctcagcactttgggagtctgaggtgggcagatcacctgaggtcaggagttcaagaccagcctagccaacatggtgaaaccccgtctctactaaaaatacaaaaattagccaggcgtggtggtgggcacctgtaatcccagctactcaggatggctgaggcaggagaatcacttgaatccaggaggcagaggttgcagtgagctgagatcatgccactgcactgcagcctaggcaacagagtgtgactctgtctcaaaaaaataaaaatacaaaaattagccaggcatggtagcacatgcctgtaatcccagctacttgagaggctgaggcatgagaatcgcttgaacctgagaggtggaggttgcagtgagccaagatcatgccactgcactccagcctgggtggcagagtgagattttgtcaaataaaagaaagtagaatagcatataagctgtggacatactcctatatattttaatcgtctctagattacctataatactgaataaaaagtaaattgttgttaaactgtattgtttagggaataatgataagaaaaaagagtctgaacatgtgtaatacagacacaaccatccttttttttttttttcaaatattttcaatccttggttgaatctgtggacatgtaactcttcaggatacaagggccagctatatatgaaactgaagtcaacagacattcttttaacattttaaggcgtttaaagttttgtgtttttgtcttaatctgaaaaataattattctagatcaagcacttttaggtgaaatgtcagtttttacagatagtataaaacaaaacttgttgataaatctcaaaaatttaatgtacttctttttgacttagaaattcaacttctaaaaatttaccctaaggatataacagaacatcaatttatacaactctataagcataatgttcataattatgattttttattttattttattttattttgagacagagtttctctcttgttgcccaggctagagtgcagtggtgtgctctcggctcactgcagcatccgccttttggtttcaagcaattctcctgcctcagcctcccaagtagcagggattataggtgcccaccaccacacctggctaatttttgtgtttttagtagagacggggtttcaccatgttggtcaggctggtctcgaactgctgacctcgtcatccacctgcctcggcctcccaaagtgctgggattacaggtgtgagccaccgtgcccggcccataattgtgaattttaagtcactttcagttatagaatacaagaatacagtttatttgccttattaagcaaaatgaagacctcatagtcaggcttttaccaccaagtccaatcttgcctccctcctgagagtgggtttgcagcaaatagcttgatgtgtatatttccagacttccttggggtatgtaacacgtatttttgagtacttataaatgatcattcctatgtatcattttgcaactcatttattttgcttaatactatcttttggtctaacccaatagaacaaagagaattacctcggtatttctaaacttgagtactgttttatagtacgactcttccagtttatgcagttatttcctcatgaagaatattatttcgtgtattttctcattgggaaattatttttatagccttaatgagttatcagtgatatgacccttaaaaggattaaaacatgttgagcgtgtggctacatcaaacagtaaaagaaaaaaaaactgttttctgtaacataggggtttaattttatttaactaacggtccatgaagcctaaccaaaccttaaccttctctgtcccttaaggcacatgaggatttcatgtatgacatcatacgagacaataaacaacatgaaaagaatgtaaggtgaggttgtcctggtgatagtatctatttaaagttttaacttatataaagttggaaaaaaaccttctagcactaggagagtgatatagtaaacatggcacttcaattgtgaaatatttattgggtaggagtcatggctgacaagaccagtgttggggaatcagcaggccagcctcctcctccttgggttagcttaaagctgtaggcttggtccagttctctgaccactgcagttgatattagccacccatgttgtgctatttacttgcatggtacaattggtaccatgcaaggtaattcagtttatctcctctaacgtcttaaggatctcagcttttgttaaagattatacctagacaagattagagagtgaataatcaggagagtttgttttttcaaactggttacattaaattataattgttgagggtgtagattatctattaggaaattgagcagttggggaatggtttagtaaagtatgcgtctgttagaatttataattgtaagtactgtgggaacctacagaaatgactaggacaaggaaaagaatacaaaaatggtttgtacactggttacagtcacataaacataggcattcaggtgaagaagaatggagaaaacaggtaaaaataaaaataagtactgtctttgtgatgtggttattcatgatccttccatattgcttttgaatgacatatttatctaagcaactgttgtaagttaaagctaaaactgactgttctttgatcaattttgaatgtttaggatacagcagttaaaacagttactggaggattctacctcaggtgaagataggagcagctccagttcctctgaaggtaaagagaaacacaagaaaaagaagaagaaagaaaagcataagaaaaggaagaaagaaaagaaaaagaagaaaaaacggaagcacaaatcttccaagtcaaatgagggttctgactcagagtgacaaggatgtgacttgttcaacattctcttctcaaacactgaccaaggaacagaggaagatgcagtcagagaaagtagcaggatagagacgccgagagaggagtatatgtgggtcacagcagtgagctcccacccgccttgcagtgaagatgtgaccccaggagagggagtgtctccttccaggtgctagctctggacagcagctgattttaggcaggaaagtttcttcatcgttgtcctccctgctggtcacatgagtttacgattccttagaagtgtctcccacagggtggcaggactgggagaatctctgaggcgtgtcttccaggccctcccacagcttgtgccctccacagtgtagacttgaacacttggcctcatgtgatccttccaccttggcctcccaaagcattgggattacaggcgagagccactggttggctaaaatatttatatttacctgacatgatttgttgatttgggggctagggagttcttaaaacaacaataaaaaatcttctgtggctgca

SEQ ID NO: 385 - DNA, 2506 bp, Homo sapiens
ttgccttccaccgtgactgtaaacttcttgaggcctcaccggaaagatattccagcaccacacttctcgtactgtctgcagaaccttgagccaggcaggtgtcttttctttataaattacccaggctaaaatggcatcatgatttctcccactaatcttcagactgttaataggatgcactttactcctgtgactagattgtgttaccagtacaaggaaagggagaccacctgggtgttcctaaccaaatcatgagaaccctctggaactcgatttgtccctggctgttaaccaaagaggaggtcagagagtccaagcctgtgaaagattccacgcatcattactggttttagagttgaaggggccacatggtgagggatgcagcaaactctcatcaaaggttcctgactaacagccagcaaggaaatggagctctcagtcctacagctgaaaagatccgcattctgccaccctcaatggttctggatgcatattcttacccagagcctccagatggaagcccacctctgctgacatcttcggttggggtttgtgagatgcaaggtcgagaacccagttgagcctgctcaggcttctgacctacaccactgtgaggtaatcagtggtggtggttttgagcttttacatttgtgagaaagtgttaatgcagcaacaaactgatccagaggtttaatgagctttccctcctcctctcaggccagtccatcacctatgctctggatcccaccaacagccagcagtagggggcagtggctggagcactggccctgcatccagactgcctggctttgaatcccagctttgctagctgtggagttgctccacctctctgtgcctccgtgtccttgactaatcatgtctaccagacttctagtgagaataaggggacttgatatccataaagcatttagagcagggtgtggcacatctcaactctaaatgaatgttacctgctcctgctgctactgctgtcaccatcatctaatcctcagggaacttcctcctcctttatcccatgtcactcacgtcttcaaactcttcctttctattgtgatcttgccccagtatttaaaaattgttttggctcatgcctgtaatctcaacactgggaggtcgaggtaggtggatcacttgaggtcaagagtttgagaccagcctggccaacatggtgaaaccccatgtctatcaaaaatacaaaaattagctgggcatggtgatacacacctgtaatcccagctactcgggaggctgaggcaggagaatcacttgaacctgggaggcggaggttgcagtgagcagaaattatgccactgcactccagcctgggcaacagagtgagaccctgctccccaaaccccaccaaaaaaaaaaaacaaaaaacaattgttttaaaactgtaaaatacatgcccgtaaagagttcacaattctgagccattggagaacaaaaagtgaaaagggagtctacttatgatgctttgatacagtgctccagatcctgatcaaaatgcattagcaaacacacacatgtaaatgcacggtttttggttagctttacataactgatagacactagtaatactgttctgtgacttcatttcactcaccgtatgttggcaattttactgctcactacaagcttcaaatggctacaaaattccttggtttgaatgtgccatgatttgtttaaccattaatctatttatcagaatgcaattctttcccatttctcattcctacaaagaagactgaaaataaaaatttttgagtaaatatctttggggtttttttttttttttttttttttttgagacagagtctcgctgtgtcactcaggctggagggcaatggcacgatctcggttcactgcaagctccacctcccgggttcacgccattctcctgcctcagcctcccaagtagctgggactataggcgcccgccaccacacctggctaattttttggatttctagtagagacggagtttcactctgttagccaggatggtctcgatctcctgacctcgtgatccgcccaccttggcctcccaaagtgctgggattacaggcgtgagccaccgcaccttgccttgagtaaatatcttaatgtatgtatgcaagtatttcaatagaatagttacctaataatggaattacatattttaagtttgacagattctaccaaattaccctccaaaagagtctaccaatttatccattctcttacagtatataaagtggcccatttccctatccagcagcatttaaacaagctcaagtctccctttaaaagaaaaaaaaaaatccggaggccacgcacagtggctcatgcctgtaatcccagcacttttgtaggccaaggcaggaggaccatttgagcccagaagtttgaggttacagtgggctatgagggcactgctgcactccagcctgggcaacagagtgagaccctgtctctgaaaaaaataaaatcctcccttgatccc

SEQ ID NO: 386 - DNA, 728 bp, Homo sapiens
caaccttttaatttttttaaaccattttggtgctgtttcttagaccctttttgtatgtacatgaatttaaaaataaaattttgatcatactcacatttatttttttatttcccattatatggataaatattttaagttatcacataacattcaaaatgaatagctgcgtaataatccctttaataagcatgccatagttcacttgcctatcttccagtgaaggcttatttaacaattctccctattttaatcctctatctttgttgctcaggctgatcttgagctcctggcctcaagcaatcctcctgcctcggcctcccaaagtgctgggtttataagcactatctttgtgcatataatcttttatttatattattatttcacccagatagattcacataggtgtgattaggtatggtcattctatggttcttgattcattttaccaaattgctttctgaaagaataagaacaattcacccaggcatgggcaatatatgagaataccctttcagtgagtataaatcacttaatatcctgaatcctaaagtcatgtgatatgaaagaattatcagtgtataggaagcttgggattcccagccccctacgccactccattccacgttgttgacctgaatattctagactcatccttagcttagttttacacggtgcttcctctaggaagtcttcccaggtcaagccccagttcctcttgagagaaatca

SEQ ID NO: 387 - DNA, 2438 bp, Homo sapiens
gctgcttccgggcttcgcggctcccggcggctccccaaggccgcggccccgacgctgggcccgggagcggtccccgcgcacagcgcccggacgcgtaggtcccgaagtaggcccgcgctttgcttcgtaactggggatctctgaggacatcttagttctgaccttgtggaggccgcgtctctgctgcgtgttcgcgggccagtcgggccactttgtagaaatcatagccctctaaatcaagggacgaacgctgctggctggagtttgctggacactttcattccacctcctaacaaagagaattcctattccttgaggtcccttggggcagcagttaaagactacacgatccaggagcacctaggacctggggccaccttcctgcccgctttattggatggagcactgcctccccagtttctgggacaccttggggtgtggccttggtgagtgaaacttggggtgctgcctgctgggaaggaaatccggaaacgcagagaggactctctggtggtgacccaggccttgtcagatctgagattcttggaatctcagattgtgggggtgtggatggtgaatgaatttgggtatgcccccctttaccccagaactgaagaggaagcaaactacttgccacacttgaggctgcatgactattcagagaagggaggagccacttctgaattcagagtaggactgcatcaccaggcaaatacctgttctgagccagaaagactctggcttctgaggagatcctgagagtctgagtagtgccaggaagcagcctcagaatttgggggcccattacacaccccagccatgttcctgcgacggcttggtggctggctacctcgcccttggggccgccggaaaccaatgaggcctgacccgccttacccagaacccagacgggtggacagctcctcggagaattcaggaagtgactgggatagtgccccagaaaccatggaagatgtggggcatcccaagactaaggactcgggggcattgagggtttctagggctgcttccgaaccaagcaaggaggagccccaagttgagcagctagggagcaaaagaatggattccctcaagtgggaccagcctatctctagcactcaagagtctgggagactggaggctggaggggccagtcccaaactcagatgggatcatgtggattcaggtggcaccaggagaccaggggtgtcccctgaagggggactgagcgtccctgggccaggagccccattggagaaacctggtaggcgtgagaagctgttgggctggctgcggggggaaccaggagctccctcccggtacttggggggcccagaagagtgtctgcagatctccaccaacctgaccctgcatcttctggagctgctggcctctgccctgctggccctgtgctcacgaccactgcgggcagccttggacacactgggcctgcgtggaccgctgggcctctggctacatggcctactgtccttcctggctgccctgcatgggctccatgctgttctgagcctacttactgcccaccctttgcacttcgcctgcctctttggtctcctgcaggccttggtgctggctgtcagcctccgggagcccaatggggatgaggcggccactgactgggagagtgaggggttggagagggaaggtgaggagcagaggggagacccgggaaaggggctgtgaccgtggggtgggggcaaagggtgaagagagtgtgggctttaggagaaaagtgtgaggcatgacccaaattgtaagcatagggacctcagggatggggaagaaacccgagtacgagggtgcagggccccccttcatacacaggagagaacagaactatttagggtgtttgtgtttatggacagtgagggcactgctcttggattcaccagctgttatttttgcttttacttttctcccaccttcagttttttttttttttccacctccactttttaaaagcaaaaaaaaaaaaaagtatgatggtggtgaataaagaccaaagggtcctctctacctttgaaaactctcctggggtggaggagaccagggcaggatagacagacctctgcagtaagagagtggttgggaaacccagggtgttccttggatctcaggatctgagccatcgagggaagagtggggctgctaggcaagtggattagggggtctggatagggccccacaggtgacagggagcctgcagggcggatctggtgatcatgggagccagagggagtggggacagtgcaggcagtattggcaggagggccagtgcagaagggctggtagctcaggcagtgtgggggaagcactgaagcctgtagtccccacttgggggctaggggtttgctcactcagcaataaataactgtgtcacatcaaatcctaaatataccactacaaagtgagagtta

SEQ ID NO: 388 - DNA, 2199 bp, Homo sapiens
gatgaggattgaaaaattatctttattatcttgagtgggagctggagctggaagtctccagcttctccctccaacaactcagctcccattgtacccatctggggacttagatgaagttacaggtcagttattggacagctcacaggcctctgtgatggggggagggaaaaagaaggacagaagggaagtccagggagaaaagcaaagttgatagtaatggggtgggggagaacgtgttctttcattccctgtgtcaaaggggagtctctaaggctcttttccctccacgtatgaccctctgccccctttatccagtgcaaactcagaaacctctcttttgagtagcccagaacccatcctgcctccctcaggtgacatcacagctcttagccacatccctctggtgacatcacacgagcctctttcaccctgtaacaccagaagacttggtgagtcctaatcctgttttatgagattttaaccccttaccttgattcctaggagtcaataagaaggctttggagtccaggcaggaagtcagggacttgaattcctccacacacttttcgggaggatgtggtgagcgatctggaagggcaaggtggggtcaggccagtcaaaacccctggaagcacctagctcttcctgggagggtgtcataggacccagagtgaggagttctcctgccctcccttgtttccctccaacccttcctgccttgtatccctactcactgtagaggagaaagcgctggtaaccctggcctgtctcattcagcatgattccacctgggcatgagctggaaaagagctcagtcttcatgtcagggcggcctgtcaaggcaggtgggagaagtatgagaacagagatgcagaaccaaactcaaggaagggtgagggctgggaagaaccaaccttcagttttgagatctgtgctcccttcagtcaggtggtagatccatttccggggcacacagagcccatctttcctgcagaggtggtggtggcaaggaggaaagaatgagcatcaccccaaccatagtgtcccagcttcttttttttttttttgagacagagtctcactctgttgcccaggctggagtgcagtggcgccatctcggctcactgcaagctctgcctcccgggttcacgccattctcctgcctcaacctcgtgagtagctgggactacaggtgcccaccaccatgcccagctagttttttatatttttagtagagacggggtttcactgtgttagccaggatggtctcgatctcctgacctcgtgatctgtccgcctcagcctcccaaagtgctgggattacaggcgtgagccaccacgtctggcctgtcccggcttctatttactccattgtatttgttattgaagcccagctctccttgggtttcaagctaccaagcattggttaggcacatctttctccagagggcaattaatacagccactgaattccgtgggccaagcatagtagatataccagctaagaggccagctcttggtgggtggattctcacactttgggcagagactgaacccagtgatgcttctgcctccttaccactcacatgcggatggtagcacgaaggtggagctgcatcggggcagagccagcagccatattgaagacaatgttgtccacagggtcaaaagttgccaactcctccttggtgggagctgcccctgcgataaagtaccactggcccaagtggacctctgggaactggagagacaatgaagggagcaaaagagggtgggttccagcacaggatgggttcaacctcttcatcagtcaaaacagcaagatttaggggtagaggtgttggctgccttcctctttccaactggggattggatccatgacaaagagtcattaaatgacttttcctctttgcccctcaccagtcaacctgggtaaccaccccaccccccaattctgccatgcctctgcattgatggccacagtactgatatttttcttcttgctttcattatcacaacactcacacccccttcctctcttcctttcccaagatggtctccagtcatcctaggccatccacccaagtccctcagagcctccaccataggcttcccccaatctcagtccatacctccttcccatccacgcccagagttgtcagttgactgtgctcagggcactggtagatggagttaagg

SEQ ID NO: 389 - DNA, 124 bp, Homo sapiens
ctccccagtagctgggattacaggcatgccccaccacgcccagctaattttgtatttttagtagagacggggtttctccatgttggccaagctggtcttgaactcccgacctcaggtgatccgc

SEQ ID NO: 390 - DNA, 188 bp, Homo sapiens
gagactttgtggggccgaggagaaggcaaagctgccttgcatttgcctggtgcctgctaagccccaagtccatccctcccctgaacaggacgctcgcagggccctgcccgtcagaatgcacgtggagtcctctgaggttcgggggtgtgggttgcacttgagggaccatcttcctggagatcccgtag

SEQ ID NO: 391 - DNA, 20845 bp, Homo sapiens
ccttcccggggcttgggaatgttctgagcccagcttcctgtcgaagaccgccatcttgctcctacgactcctggtcaccgtggtcccgggcccttctctgaaaaggggcatccccagcccggagcgtgatggaccaatgcgagggcctgagcccgagggtgcggacagtaaaccgtttattactgtgtggacacagacaccgtggtgcatgacagacagtttcaacaccatgagcgctggggacggagctgtgcctggacagctctgcggtgtgtggtggcgccacgctgggccggctgtcaccgccagctgaggcgctaacagcgtcacctgggagaaaacctggaaaccgtctaatgaagcaggtgacttaggggcgtctctagaaacccaaagaaatgtaccttaaataagcaaatataaaacacaaaaaagacgagcagacctggtgttccgtgtcaggcagaatctaaaaaaacccaggagttgcacttggtttcctcactgtcatgtgtgatcacaggtcaggacgtttcacagcagcgcgcccaggctcctgtgcgtgctctggtgcactggagtctggggctggctgggcttctggctgtcctctgtcgccggatgggctcgacgaatcagcgcagcgaggccggccccttacgtggtgctgatcccactcagctcctgcctgatggctgcgggacaggtggcggcggctcaggtgcagccatgaccagtgcagcccggttcctcatcagggccccgcacccctggcgtggacctgcctggtatgtgtccctgttccatctcctgggagccccacccaggctttggcatagacctctggggtgatgaccaaaggctttgggtctcatctgccattccttctgcggcggcccctgctgccactgcccttttaggggaggacctggcgtagggacagaggcctgtgccctgcctgtggcctcactgctgctgaggagtgctgggcaccagaactctggtgtgaggagctgctgtgtggggacgcagggtctctgtaggctctggacaggtgggtgtccaggtgccgggggcccgggagcccttcccccaacatagtggaggctgaggctctgccctcccagctcctgcaggggtcagcaggaaatcttggccctggaccccagggactgccctggctctgctcactcctcaggagaggcagggtcctctcttgcctccccccagcttcctcatcaccccaagctagtgctccaacccccggcctcccaaatttgggcctttccctccttcctctggtatccatcccctcccggactccccctcctctatgtcaactcaggcctctctctggatggaccttgctgggccaagagccaacagccaggagaaggttgtgggggctgggggatgggagctgcttctcagagcccctggtatggcccatgcctacccccgggctctcagccagggtgggttccacctggggctgcacccacagcaggtggagaggctgtggtgggccctgggtttctgacccagctatgcctggggccagacggcacccagcagtaaggcggtgtgaccagttggctgagtgcctgcctatcgcccaggctgcctcattcccctcatttgttaactccttatctccccagcccaggcctttgggggaactggacaaacaggaactgagtgctctctgctcaaacaagggtgggccggctgggggaggaggcctgggtctttgggctcccacctgcctcttccctctgccatcagcctccacccctgtgcgcttgtgggacccttttgccccggtcactgtgatgccctgggggccagacccagctacacacccaggtgtcagcctttatcaccctggttggggaggcacgtggggagctggcactggctgtgctgcatagctcgtccctagactgagtctgccctgcccactcccccttttcctctggctgcagatctgaggcagagcattcaaaggctctgctgggaaccggaaggacggatgtgatgcattgagacccaccctgctctggagccagaggctgctccctgcctgttccccagcccagggccaggcaggctgtgaacgagctcaagcctggaaggtgcttctgtagaccttggtcttcctgtacccccaggaaggcagagtggtcacctcagaagcccaacaccagtgactggaggtggcagtatcaagaaggcagtataaaccgccagggggtggaatgacagcagctcaggtggctcctccagacctggctctggaacgatgctggggtctcccctccatgctcttcccacgtgggtcttccaggaaggtgccggggatgtggaaggtcagattcgggtgtcatgctaccagggagctacaaattcttaggcaagccacttagctttcagctttcctgagcctgtttcctcaactagagatggtaagaatgaaatctctcacagggcccagtgcagtatgggctccagctcaaaactggaggcccccagcctgggtgacagggacccttgtcctgcggccacacctgggtgccaccctccccggtggggctgcactcaccgtcgatgatctcctccttcaccttgtggagctctctcaccacctcctctaggatctcctgttgggagaggagtgtccaggtgaagggacaggcagtggagacggaaaagccggcctgggctgggccatgtccaaagggcttggggtctcctgggcctctccagagttgcatctgtcacccttgtctcctcgtggcccccttcccacgctgaggggggacggcatgggaggcctgggaaaatcctgctgccacctccctcaggtagacgccactgaaactaagggcttcctcggggcagaaagccccagaggcaggcctgagggaggtgcccagaaaggttgagggacatcctagttctggtgatggcaggggctggggacaaaggacaggcttgggcaccccctttctgccgtggctgctccctgactggccttttggcagctacatgtgggcccccagggcctgcctggccatgctggtcagagacggtcccccgcctgctggctgccctcagcctcttgagggaagggcacagggcatgctcacctgcttcatccggtccaagtcgaaggcatccagggccatgtcattcacgctcccagcaggcttcatcctgggagagaaagggcctgtgggtgccctggctggagacaggtgtgggggaaagctggctgtgcagaggccccgctcaggctgggcccacctgctcccctcgctccatagaggctgcttgcttcagactctggccacctcagactgcctgagaaggatttaacgcccgtctccacctcaagaggtctccatggataccgtgactgtatttcccaacccgagagccaaggctggctggggtcaacaaagaaactgctttctgatcagagagctcttatgcagaggtggcaacttaagtgacaacatcgcacccacccgttgcctccctggaaagaaacacagtattgacagcctcctcctcagggtgggagctcatgctccaggttgagcttggggctcggggaagcagcagcggcggcaggaggcacaatgtgaagttgcagagttcacaccggcctggaggcgcgctcctgacacaccagcgcccctggtgctggagcctgctcgggcatagcacacctcccccaagaaacatcctcccatgtggtgtcgctttttttttttcagacagagttttgctcttgttccccagattggagtgcaatggcgcaatcttggctcactgcaacctctgcctcccaggttcaagcaattctcctacctcagcctccccagtagctggcattacaggcatgtgccacttttgtattttcagctaacttttgtattttcagcagagatggggtttcaccatgttggccaagctggtcttgaactcctgacctcacgagatccacccacctgggcctcccagagtgctgggattatgggcgtgagcccctgcacctggctggttttgctctttcaaggtagttctcgtggactacttctttgaaaagtttccaaactaaggtaaccgatttgaattttatttttacttatttgagacagggtctcactctgtcaaccaggctggagtacagaggcgtatcatgcctcactgcagcctcaacctcccaggctcaagtgagcctcccgagtagctgggactacagacatgtgcccttttttttttcttttttaactttttgtagagatggggtctcactgtgttgcccagactggtctccaagtcctgggctcaagtgatcctcccgcctcggcctcccaaagtgctgggatgacaggcatgagcaccgcgctggcctgatttgaatgttaatgtgtcacacatgcatcttccctggaagatcttggcaaaatgcttgtctctctggtcttttaaacatgacttggtgctgaaagacacactgctgggacccaagttccctcccacatggacgggatggaggctggagcccaaggtttcagggaaacgtatgtggcctgtgcccctgggtgtgatcatgggcacacacatttatctggcagggccagccttggctgctgaggggtcatgggcacagaggaggaccatctggtgacactgaggaccagtgttgcccacagccagggagaataaggatgaagaatgagtgttgccacacccctccagatgagctcaagaaagaggccaagcctagccctaaacaggtctgtaagtaattctgggtcctgataggcaaacgcatccagccagagggccctgggtccttcaggcctctcctgtgggttccagaccctgttccagcaacaattgctgggacacctgggccgactgctccacctcgccaggccctggccctctccatctcagccctgacagccacccagtgataaacacagcaggcttcctaagcaatgtgacgcaccagaggggtggtggtacacgttccccttgaagtcatctgaaaattagagaacagatttgcctcagagctgaagagagaccctattccaagcatgaatggccttgacaatgttcctgcccagtgagcgacccttggccactcacaacatggcagcccgcctttgctccaccagcaggacgtggcggagtccgctgggagcgctgcaggctccccttgctgccgtgtctgctccagggccctcgttttgcccactctggttgccttccccttcccagcctccaccatggcaccctgtgcctcaagttccatgactgggccctgcgcatgaacacaatgcaaacttctaactccgcgctcccccacaccctcttcctcacccttcccgttcccctgccccatggcctgtctgcttccaggtggaggtgcgggggagcttggcgggtggctgcaggctcagggccctggcacttacccttccttcagcttgggaggctgtccccatgatctccgcagagcagactcctcctcgtccgggtcaacgaaaatgccagctcccgacagaggcttgccccaccccactccgcaaagcaccctgtcccttccaccatgtggccctgcaccctgtccagagcacccctcaggaccacagtggccttgttcacacggtgctctttgcaggcagggactgtccccagcacacggcctggctgaccacaagccttggacaaaccccagctgactgctaagacttcctcatctctgtccacctgcactgctctgctctcaccacctgttcagctctgcaaggccagtttcaatgcctcctgctctgtgataagggtggtttcccttcaatttgtggtggcgatggagacattcttgacgcaggttctagaggccttccaattcaggccacatgtacctccagatactatgtggctggctgcctctgcctttttgggcaatctcagttccaaatattctatcatgttgtcatgccagcttttggcttgggaaatatggtcagtatgtctgtggggaaactgattctgtgtgccggccgcagaggaaggactctgggctggaggaaaggggtagggctcagcgccagtgctaggactggttgaactgtagggtgcagccctggctagtgaccacaccccatgtccagctgttgctcacagctgtccccaccaccaccctgtgcagcaggggttaacagacctcactttgtggggggaaaacagaggcttggagaggtcccctaacttgcccactgtcacacgtagtgagtccagagctgggactccatgttggcccccccctgcactacctctgtggacaggtcactgccctccttgcccttggtctctctctcagagggaaaagacggagcagctgactgacaggaccccgaggtcctgggtctgaaagaacagaccaccttcgcagagcaagttgttaaatgccaggacgtgagacagcgtgcaagggtgttagtcacgggacgggggacagaggagccccaaaccctgggggacatgtgagcaggagggttgttcggtacctagagtgaggctgcgactgaagggggctcttagcttcggggctctttgccacagacggggttctacggcaatggaatgaaacagacatgtgaatcggcgccagcgcccgcctctgccccaccagcctcgctgctcaggccttcctggggcagctcacctggacagaatcgaggacacaggcttctccaccgagttgctccgctcccagggcttccggccagcctctgtcagttcatttcatggatgaagaacctcacaggtgaagggactcagtagccaccccaatcccctaaacaccccaacaggaagccctcacccatgccaagggtgcagagccccgtggcaggaaggtctgattgagttaagccaaaacctggcaccttgttctcagtcccccatggcctaggtcaggttgaccctgacctgtgatctggttctgagcccttcactgtgccaggtctctctggaatgtgagcctgctggtaagggacccagtgactagagccacagggcgagcaagcacgacctccccggacatcccagcacagccttgctcccacgtgtggtgtggcggccaggcccctcggcccggcacctgctactgaggggctccttagtctgcctcccatgctgcgcctggctctgtcccattctggctggcttgtcttttttaagtggtattggattatattttgttctactccaaaagatttgttgcattaacttgaattcgttgactgtgcaggacaagcagaggcagaagacaaaatctctagggggtagtggggcagctgcctggcccagagctaagccttggcaccctgcggaccaacggtgggattgaggcagttttcctcaaagccaccttctgggacaggcgctgggcctgcaggcactagacctggggctacagacatgtcccaggtgtgtggccttgagcaaaccactttgcacacagatgggaaccacgtagcccactcactgggctgttggaagaagcaaacagggcaggggtattgatcacgttcatcagccaggaacctatgcatcctggcaaatcaagacaccaggcaaaaatcttaggaggagaggacatggcgtgcagtttcacagggaggcgacacccaacctgagcatgccccagagacacacgcgaacagctggcaagagcctcctctgcccagctagggcagcctgatgcccctgtctctcctcgctgtgctcatgagcacaggcctggcacagagcaggtgctgcaaagatgtttgtcgaatgaacaaccaaccctggggtcttcctcccctgcgaagcctcatcatactctcctaactacctcccatctgccacagcttagacagagagaaacctgagccagggaaggggctgcgttttgggtggagcgagatctactgccatctctgtaatgtcggtcatcagctggcgtttcactgggagacatgagtcctgacactgatacctcttaagagcactggccccagcctgcctcaggagccctggacacaaactcccaccctgaatatgtgccgtcaggcaagtgccttctctcgtgcgggactcagggtcctggtgggaaggtgacacgcaggtcaccctggggacccatcacagtggctctgctctagcacttcctgtgctcccacatgggctcctgggggaggctctgggggacccataagaaatgggcttccctgtggcctggccctctgctcaggcatactaaagaggctggatcagagggtcctgtccgaagggtcccccctcccactctgagacctcatgcctcactggggtcagcggggggcgccctctcacctgaggagttaggtggctggctggctgctcgggtccccggagagggggaggtactaggatcttcctaaaatggagaagaagggagtctgtttaggaaggccacctggggccagggcaggacatcattggacacttcataaaacctcagttttccaaatgttcccaatgaacacatatgacttttataattagcaaaacattaaatatttaaaagtgaaaacgcaaaatctcagtggggagagaatcgagccagtggacaaagctggggaaggggaaggctacagggagctacaggctctcagcagggtgatatagaacttccttctggccctcaacacccgcaagccctgagccccccttgggccggatgcctcccgtatgtcatctcactgacttctcatgagcaccccgtggactggcctgctccccctgtgcagcacacacacctgcccgtgtaataggtctgtggcagtgctcgaacagtggacgtgttcatccagcagtggggacacctaacactcatcatgcatggcatgtgcgtcaggatggtttttcagcatcaggaacatgccactgattaagtaataagagtaatccttccacttgatgaagcagaatgcacagcatttgagctgttgacaggcggccacccaacctgatgtgtcattctgatctgaagcaaagaacctctcccttgtcaccgtgggcagaggtctttgctttgtctcctctgctcactacatccccacacgagaatcaggaacgccctgcgtatctgtgtggtgaacgagtaagtcccgggaggctctggtcgagaggcaaaagcaggtgccagcctgcaggtgctgggatgaggttctcaggcctcctcattttaaagacagctgaataacagattatgtcaatcaacacacacatgtgggggccacgatgaaagcgatacagggtgacatcagagtcactaaaaaattatcatcttttcttgtatgttatttttttaaaaccctccctgcttaaaagggaagttatgctttgactctaggctgggaaagaggtggccgcagcactcccaggccctgggcacagagacttgcaccccacctctggcagtcgcacagtctgtgaggcggccatgcctgggtgcaggttttcaggtggtggaactggtcctcggagcagtaactccattggcccagggccagctctgccatggcagagggcctgcccaagtcaccggactccacatttggggctcttttcgtctttcaaataagccttctttcttctctgttaatgataaacttagtgcatgttcactgcagagaattggggaaataccaggaagcatgaacaagaaaacgagtgccggccatcagcctctctccctcccactgcacttgtgtggtgtgtggatcttctgaaggccctgctctctttagacgctagtcctgggtatgagaagggaccatggcaaacaagaaccagctgtagccaggggcctgtgaaaaacaagacagaaaagatgggggtctgaggaggagagtgctatccttggggttgaaggtttcaagaatgttcctcttccagaagcccctgggctttgaaatccattcttcttagagctccaggagcgagagttttagttttcaggggctgggactgcaacatactggcacctgactaagaaaggccagcgatgtcttcagatccccagggctgtggctggagcgaggccacagtattttgatgtctgtgattatcccgtggcctgcaatttcagaaattcatggcaagtcagttggctaaactccacagcatgtgcaaggtatgggaatggtggacgtgtgagaagcccaggcctcgccctccaagggcctaagatctggcaggagacaacgagtctccacaagcagtcgtgcctgtgcagagggcctcgggagaagaccggggctgggatcaagtagtgaggagctttgtgaggcctgggggtcgggaggctgtttttttgttgttgttgtttgttttgtttttgagacggagtctcgttcttgttgcccaggctggagtgcaatggtgcgatctctgctcactacaacctccgcctcccaggttcaagcaattctcctgcctcagcctcccgagtagctgggattacaggcatgcgccaccatgccccgctaattttgtatttttagtagagatgacgtttcactatgttggccaggctggtctcaaactcctgacctcaggtgatccgtctgcctcggcctcccaaagtgctgggactacaagtgtgaagtgttgagccggccgggaggctgttttttaaggtgtaagggtgatgcagggaagtgcaggctgaatgggagttggctggtggggcaaagggacccatatgtgcccaggacggggctgagaggcgtggatcagctgggagggctatagcctcagggtaacaccagcatgaccctgactgatgggaggacagggcaggaagcctgctctggtccctggcagttttatttcctctctgattctgcactgaggtggaaccttcaaggcatttgtagttaaggctaaacttagccctgtcagtaggagtctttttataggaaaagcttaacatggaggaaaagagaattagccgccctaactggaagcagatgttgggagctctggcagccaggctggctctgggctgcctggtaaggacaagagccaggggtccagggctcctttgccacagctcacctgaagctcctgctggaagaggagtctttagaaacagaaataatttgaaaataaaaacctctctgggcttctggcagacgtgcccctctgcagtgtactcctggagtcccagtcccgccgagaccctggctggtctgtgctccccggggctcctgggaaggcgaggtagccctgcggtgcagcggccagcgcctcaggctgcagctccaagggtggagcagtgtctggtagggggtgctcagtgagggcaggcctgctgctggggccagggtggcgcagggacaagcaccgcagagaccctccgcccctcctgtgaatcacctgatgaagcgcccatcccacgcatgtcccaaaggcctcgcctgagaccagagagcctccctggcgatgcgctcatctcagtggggagcctgagggtggggcgggctgcttgctcaccatttggctttcatcttccttcttctcggctggcttgtctgactgggaggctgcttttctcctaggcacagagaaggggaagatacagatcagctcctcacgttctctcactgtcccagaactcttctgcctccaccctgccagactcaccccggtcctcagataaacctgtgtgggaaaacgatggcgtgaaggaggcggcttgtctaggccccgtctggtgaggagccaggcccaggcaaatgtccaggccctccgtgtggtcatggcctgggacacaaaactggtctaggcagagagggcgagatgcctctatgtctgtttagctctactggcagcagctgtagcatctgaggcgtggaggggaggcgggcacgctctgtccccaggacactgaaggcctggccacacgggacagagaggcatctctctgggctgcagtctgtcccacaggtcgggacactggacactttcttgtgtcactctaaggcccttgtgtcttggaactcagttaacccagccacgccctccccaatctagaatgccactcagagcctggaaatgctcagaagaggagccctggaataggtccacgtgacgcccttgagtcggttcgtgcacctccccagtatgaatccccgtttcatgtactctaaaacctcacccatattttttggcctcagtggtatctgctgacctcccaggtctacagaggcaggcagaccctcagtgtttcccagagatacgcttctgtggcttttcaacttgagatgagctgcccatcaagcatggagctggtctgaggtgtgataatgggccgtggccaggctgtcacctgtctgtgatgggcctacctggcagcctcctcagctacagcaggggcccccttctttagctcccatctcaggacaggtctgcccacctcgtccctcagcccagaaaccagggaatcatccctgacaccagcttcttataactgtcagcctggtcagttctctaaatctgggtacctgcctgtcttttttgtcttcaccttcaacaccttcctgcatgcccctatcatctcttcctggactgtcagagtctcctaactggcctagccacgatcacttacacctcaccagctaccccccagcagccagtgtcccatctcctagaaacagaacgctgaccaagccacctgctcacggggagtgtaggcgggatgagtgtctgtgaaagtgctgctgaacaggagctttctgtccacgttcatttccctcctgccctccactgttgggagactcaactgcatgccctcagaggcgggagacaacctacatgaaaagaaacctggcaagggcactttcatcgtcggctccacccagtagccatcactgaggtggatttcagagagcacctgattgatccctgctgagctatgcaaagcatgtttgttcttgggagggccttgactctcccaccggcatctggcatctcactggctcctggcaatactggccttttcctgttctcagacagaaaggtgcttcccctcagcttggtctaggacttagggaaagcattcatattttcttttccaaaactatttctatttctctgtggcccatcctcgcctctgagtgctctgaggtggaacccgatgccctgcaccaggaggctccctcttccagcctgacttttggtccatttcctccacacctagctctccaggcacagggggcgtcagccttcccagccttaccttaactctgcccactgtccctcttacagcacgggacgtcctcatcgttctgcgagccctcccggctctctcacccacggagccattcgcctttgtgtggccactgtaagccccacacacctggacttactctcacaggaaactgctcagaagcctgcctcctgtcttggcgatgtacaaacgcccaggcccagtagaggctccggagacgcccgtgctgcggatccaccttgctgctccctgacacacggggagcctcccctccctgccatctgtgatgcaagcaaagagccccttggcaggaaacccaggctgtggccctgccatgaagcgccacaccagctgcctgcagctgtgggcctctgtcatctcgcatcatcctcatggagccacgggaaggtaatgagaggaactaggactgcagtgtgaagaccctgggcacacagagttctcacttgggtcagccaattggaaggcagctgggagggccaggagaaggcgacaaagtggcagggggtggaggtggggttaccaagggagcagggcccccgctgcagcttcctctgttctggcaggtgaggcctactcccgtgccctctggtgcctaagtgagccacgatattggtagtccaaggtgagcacattcctgatgccaagtcatatttaaaaataaaatccaagctttgcatcccttttgagaaagacctggacgatctccccatctgctcgggtttcatttggggaacagcggagagccacaatggcaggctgcagccacacccgctgcagcgagcagacacacatggccaggtctcaggcccaagagcccggccgggatgtagatggaactactctctctccgtcgctcagggcaatgccctctgggctcctacccttcataactccttctcctgagtcctccataaagaaccctggagaatggggtgccttcaccacacattcaccagagtgtcctctgcaaactcgaccactgcggccacatcttatttctgttaggatcttaagagcaaggactgttctttttcccgcatttatctctgaaattgtctccacatttatctctgctcaggacagggctggtacatggtagatgcttcaggaaatatttgctgagctaaaatgaaggatctggagtttagaggactcctgtgggcttgcgcttcagactaaccccttgggaagggaaaacttaagtaacagtttcccctgcttggctaaacccagggaacaaagattctggggtcaagagaggattctctgtgcagcgctgggggcgggggcaggagcttcctgctaggcacaccaagtctcgggaggtgtagagacccacctcttggccagcagtttgttcatttcctccatgaggcctcctccgccacccccgctgcttgcccggttggcatcggactttgaggtcccactgggactggagcctccagatgcgtcttctggctgaggaaaaaggaggccgcgttttagattctgctgctgatggcagaacaggagcagcaacgatgtgaggggatgcaggggactgtgtgcgtgtgaatcctatggcagcagcactgcaaggggcctcaggggccatctggtccattattctccaaccccacaggggagaaaaccagaatcgagagagggacaaggaccagcccaggtcacacaagtcgcagacactccccaggcctgcagactcatggttagtgtctttgccaagaccagccatgacacatggagggagggagggaggggagaagagactatcctgtgggaaggaaacacaatgtaagccaaaggtctgtattagagctattcttacaagcacagttctagaacatatgagcaagggttagggaagaaacagccgggtggacctagttgccagcatacagcttcctacagtggaaagggcaatggacatagattcaggagacccaggcttgagtccaaaatctgcaatttgtaaacggtgtgacttgagcaaattactcgtgctctttgtgcttcaatttcctcatctctaaagggggacatagttcttgccccacgtgtgaaggtcaacgtgaggctcaaaggctaacttcataatttcaaagtgctgtcccatgtgatttctcgtttgagaacaagtggccaagggccagctagctttgggcagggaagcagtttgctgtgtctcgcagatgcgggaaggaacacaagcgctctgcagatggcacaagggtcccctcggtcccattcccaccccgcacacaggagctcttacccgttggactcttctcagcttggccccagctatggcagcggccagtcctgacatggagctctcgtcgtggctggacccctgggctcctccggctggcagtgggggtgggggaggtggggtagccccagtgggtggaggtgggactgggggtggggggggcggtggaggcccactacatgagacgggggcgctggctgcagatgaaggatgtcctggtgggaggatgggccctgaaacacaacagtgaggctcagccagctccagcacccagctgggggccaagcctgctgctctcagctcaggttccccggaggaaggacaggggcaggctgctccccaaagggatgagaaacagctccaggcctgcttcatccaggaagcctccgcgggatgaacttggctctggcacaattattccctattctggtgtcctcagtactccggggcctggctggacccacaggtgtcctctatttgcttaacattccttgagcccaggcaatttcctcttgctccaatcatgtttttccagggggagaggaagctgtctggttacagtctgtgcctcttctcttctctgctccttctaagcacctagcaccccctaggcagaagttggtcaccaagatccaactgtgactgacacttgggtcgttgggggccgtggcaggtcctgtgggtcccagggccgactgggggcatgggtcagggcgcaatgccgagtgctgggctccagcatcatccatccagccccttccgccagtgctgcctaagcctgttttgtgccaggcactgtgctaggtgctgggtatggtgctgaggaaaaccagccacaagctctctgctcagggtgctcacagcctatgaggaacagtcaacgaatcgcagaggtaaacgcagatggaggactgtggcaagctgacaagtgttaccaagggcaggcacacggcgccatgttggcatacaaagaggggctccagcctggccagaagttcatggaagacggacgtcctccatgacgtcctcacggaagtgactgtggagctgggacacgaccggagagcaggggttcagttaggtgaaggggggaggcaagtgtgaggaaggaggaaaaggatgggaagtgcttgcgaggcactagagggagagagggcaggcacaggctgttccaagagtgatggggaagggacgacatgatgacagtgtcagacctgcatcagaaatgcagactggccggggagcaggaggccagcagcagctaggtgggggtgatggggtcagccagcatctcacgagcagagcgttcctgtaaccagtgggggctcgggtttctcatcagtcaacaggataatagtcacctgctcacttcatagggtgtttgagaaaattaaacaagacaaaggacatgaaagcacttggtaaattatccagtcctttgcctatcagtgaacatgacaatttctggaaaaccctcgtccttctcctttaacgtgctaagctccaccgaacgtccaagacagacgcgtggcagcgcctcctgtgggaagtcttcctgacccaaggtaggccttcagcacctgcacgtcacttgccacagtgttcactacgtgacatgacaagggtgggttcactgtctccttgagtggacagcgggcttcctgagggcaggaactgcatctgcagtcatagttgtgtccccagcccttagcacggtgcctgagacacaggaggtgcttgctgaatgtccactccggagaaggttggcaggtagtggccagacccagctgagcagactccccaagcctctgctctgctctcttgctaccctcaccatctgaagtggtggttgcactttgagacctaggctccccatagctgctcacagagcgccccgtgtgtccctgggcctcatctacgtggaggggctgccacctggcagcagcatgggagtcggccctaggggaggagggctctcacctgtggccgaggttcttctttctagagattcctgacgctgctgctggtgctgctccatcacttgtctggaaagtaatcacagcagggcagtctgactcctccactctggagaccaccacactctgtgcctgtgctgtacccgccggccccggcttcagagtcaggtttcgccagcgctccacaagcgccactgtgtgccacggctgcctccacttaacagaggagggggatgtgactgggtccagctcccgcaagtgggagcaccggctgtctcctgagtctcaggcacactgaacacagagctccttatggaaggccagtgtgattccactccccagagtgaccaagctcttccctgggctagatgggcgcacctggcttttgggagcctgtggcctcaacagacccagcctcaggaacgcctgttcttagtggacctggccaagcttcctgggacagttctcaggtgtgttttggttgccagcagaaatggacacaaaggccacactcctcattttctttaccactgagcggtcataggcccgccttcgtctagagggccatttggtgcaccgtggcacactgctacgtgcacagcagtgggaactcacatcccagtgccttatggcagggtggcctcagggtgctcttaaaggcaagctgagtgaggacactgaggcccagatacatctccagaatccagggatcgagttctggagtgggaggcactttaagaaatcatccaggccacagacagcatcaagagctcagctcgtgtggtgcaaactgaacatgtgctgtggaaacacagggctaaggattgttctgaaggcagctctgggcttggtgggagtgccagaaacatctatttcatggggttcttgtagggtgtatgccttaactaaaacattatggaatggctgggcgtggtggctcacgcctgtaatcacagcactttgggagggtgaggcgggcggatgacgaggccaggagtttgagaccagcctgaccaacatggtgaaaccccatctctactaaaaatacaaaaatgagctgggtgtggtggcgcgcgcctgtaatcccagctactcaaggggctgaggcagaagaatctcttgaacccaggaagtggaggttgcagttagccaagattgcgtcactacactccagcccgggtgacagagcaagactccatctcaaaaaaaaaaaaaaattacggaaaagccccttttagcattaaggtctgaaaagctcccagcagcatctacattagtgtctctgctcaaactgctgaaacctccccagcaggagccacacacctagaacaccatggtaaaatgaggatgtgtgaaaaatactcaagtcaggtctgaacctatggtactgtttggatgcttggagtctctgcgtcactgagtaagtcttgcccctgcccacctccagtaaagttgcgtgggacaagcgagagtctccctgccgtgtgtgtgtgtgtgtgtgtgtgtgtgtgtgtgtgtgtgtattcctgccttggggcaggtgtgtgtgtgtctgtgtgtgtgatcccgtcttggggcaggtgtgtgtgtgtgtgtgtgtgtgtgtattcctgccttggggcaggtgtgtgtgtgtgtgtgtgtgtgtgtgtggtcccgccttggggcaggtgtgtgtgtctgtgtctgtgtgtggtcccaccgtggagcaggtgtgtgtgtgtgtgtctatccacatgtggtctcatcttggggcaggtgtgtgtgtgtgcgcatgtgtgtggtctcgtcttgcagcaggtgtgtgtgtccgtccgtacgtggtctcgtctgggggcagctatgtgtgtggtcctgccttgggacaagtgtatgtgcttgtgtgtgtgtcccctgctgttcacaccccgaccgccaggcggtatgcccattcccggacggccagtgaccccacacagcttggattgggccctggggtacagaattcagcactgcgggtgatgaagcagtttcgagagaaatgaagtacccatttagccatccacgcctgtacgcttacacctggcgtctggtggctcactccttcacgcccttttgtgggtgggaccagccttgggtcccggcagggagctgcagctggagtgagacttgactgccagtctaggttctgcctgactctctggttactctgggcaagtcacttccattctcggcttcagctggctcatggggacaacagtaagaaaagccctgagggtgagtgggtgagacaggtggggagcaaagccaacaccatcttcaaaccgggaaacggaggcttggagcaggaacttgcccaaggttgcaaggcattcatttctcagtcttaggaaaaggccagaggagaggaggtcttgggagaagtccgtatgccatttggtgagaggggtaggtgggggcagaagccggctttcctgactcctagtccagggctggacataagtgtagccacagagagctgcagcttgactccctatctgacaaagctgagtgaggaaggcccgggccaggccctacctccctcgacacagaagaggcagaggacccatcgctgagagggcagacctgggttcaagtcctgactctgccatttcagagcaatgtgaccttgggaggctgctccatggggactcaccacgactctgtaatttcgggacaacagccttggcccttcctcttccccactgtggtaacactttagaagctccatggggtgagggggttcattcctatggtccctagccccatcccatgggcgtgactgccccaacaggctgaatccctcatgcctggactgcctcctgctacgttggggaagggcaagtgaggcaacaagggagcagcacttgggccctgctgggtcaccctgagagccgtcccgctggaggtcagcagcactctctgtagaatgccagactcccacagtcattcctggtcttggtgtccgggaccagcggctgcgcatcggccccctctttcttcctggtctggcttgcaccttgcaccctcccgcagtgtatgcctctaggagtcctggccttggctgctggtgcatcctcacccgctgaaggcacccctggccacccagcctgattgggagatgaccagcctggcccctgcgggtgctgggttaccttctctggatgtccatctcatcaggagaggggccattctgcacctgacgct

SEQ ID NO: 392 - DNA, 9371 bp, Homo sapiens
ggccggggctgaggctctgtcagtggtaactggtaaaatccaggaccaaactgccagagccacaaggggatcctggggctccatctcccagccacagagctgcccggctgcagggtaaacccatctctgtaacgtacgggggcctggctgctcccagatcttcagtatatatttgtcactggaaatgaaaggcaggtttagtgagcggctggtgagaagctggacacttgccacactttccagatccaactaggtcccagggtgcctcccacactggacagggtcaggcttgtctcttggcacaaaacctcaggtggcagggatggaagctgtgggtaggtggcttcccagagcattaggccagggctgggaggaagaagtttaggaaggaggggattaggagggctttgctgcctttgtgaggagaagcttgtcccaggtcaggttactcagctgtggatgggtggggaagaggccacgttgtatggaagcatttcctgctgtggccaccaggtggcatcgtcaaccctgagcaggtttgtggtggaacagggagctgggaagcaggtggcggcagaggtggaatgttggagggatgatgggcagtgacgggcacctcccatgtggccagtgagtgactgtcatatgatggcatttggcctccctgggaaggtgatacagcaggtctccctagatgttgccagagccagggcttgggggctcactggggcccagtgtggaagagataagaggcccctttgcttttgggagccctgctggggacaagacaaaagtgactttattgccagctagtcaggaggggcaggggtggagtggcctgtgactgggagtaggggtgtggcgtgggggggccctgtctctgctactcttggaggcaagggtacagcagcctctctggcctggctgcctgtttctgatgcggtccctctgctcaatggctcagcagatttgtcaggagcatttctgggcaaaggctgtaacccatcagagtcgcaccagggtgatgcaactgtcctgtgggtgcagggggctttgggctggcctcccttcagcaggccctgcctctggctctgccctctggcattttatgagtgagcctgctaactggtataagtgtgcagacgtttcacaccttggcatctgctgccccttcttctccataggcccctagggaagaccccacctccatgggctcccagccacagaggctgtcagagcagatgccttacagatggagactgaggagacaggtccagagagggacaggggcttgcccaagggcacacaggagtctgactgagcctgatccatgattttttctttctttttttttttttttttgagacgctttgttgccaggctggagtccagtggtgtgattttggctcactgcaacctctgcctcccaggttcaagcaattctcctgcctcagcctcctaagtagctggaactacaggcgcacgccaccttgtccagctgatttttgtatttttagtagagacggggtttcaccatgttggccaggctggttttgaactcctgacctcaagtgatctgcccgtctcagcctcccaaagtgctgggattacaggtgtgagccactgcgcccagatctgatccagaattttctctgggtgctctgtggcagtgtagccaagcactagatcggtgctgatggagtctgagtccacatcggggccttgctcaccattgtgcaggcctggagtcgggggtcctgagttcaagtcttggctcggtcagccttgttgcaccttggtgggcccttctttgcacctcccttgacctcagacccttcctgagtcctgcctggacagggtgacttctagcaacagctgttgttcatggccacctgcccagatgccttgtgcctcacctggggccgctgctggaaaccgtctgtgtgggtctgtgtatcttggttccaggtggctgtgcacgtcgggctctgtgctgccccacggagcagagagccctcaaggcacatgtgtctcccagctactcctgccatccaggctggaggtgtggaagggcagagtcacacctgaggtcagctgagtgcccacagcaggacagagttcccaggctgggccaggtttgggtgtctagccagagcccatgcaggcctgcaattcctcatggggctgccagggagctgtgtctctccctgtccttctctgccttgggctttccccctctcttgtggcccagagaagatggggcccaaggccatggaacccattgactcccactccccagccccacccattctccctgtccccctttctttgaggccctggaagaggccctgtattagtgttctccagagagacagaactgataggatctatgtatctatctctcacatctattatctatctatctatctatctatctatctatctatctatctatctatctatctgtttttgccattactgtcgcccaggctggagtgcagtggtgcaattgcggctcactgcagccccgaactcctgggctcaagcgatcttcccacctcagcctcccaagtagctgggaccacaggcacacaccaccacacctggctgatttttaaactttttgcataataaggccttgctatattgcccaggctgatcctgacctcctgggctcaaggaaacctcctgcctcagcctcccaaagtgctgagattacaatgtaagccaccatgcctggatcaatcgatatatcgatctatcttcctatcttccttccttccctttccctccctccctcccttccttctttccttccatccatccatccatccattcgaagaggggatttattaggggaattggctcatgtgattatggaggctgtaaagtcccatgacagactgtctgcaagctggagacccaggggtggcagtaggggtagcgtggttcagtctgagtctgagggcctcagaaccagggaactcgacggtggaaccctcagtatgatattgaaggcctgaaagcaggcggagggtggagggtgctggtgtagttcctggagtccaaaggctggagttttgatatccaaggactagagaagtgtgtgttgcagctccaagagagggaagtggtgggagaagtagagaaggatgggaggagagagggagggaaagacaggagggagacccttgtctctgcctttttgttctatcggggccctagctgattggatggtgctggcccacattgtgggcgggccttcctcactcagtccacttaccctctgccagtctggaaacaccttgacagacacccagaaataatgctccatagctctcgaggagttcctgagtccccttggcacccagctccagtgacccttgccttctccatgatgcccaccctggcatctccatgacgcccaccctggcatctccatgacgcccaccctggcatctccttcccatcctgccgtcctctggtgcctccctgttgccctccctgccccatgccctaggcagacccaccctcgctacctcatctcaccctcgccttgcctcgggctgtgccggaatggctcctgctgagacaccatgacctggctaagtcgagggacacctgctctctcttcttgtccctgaacctctgtgacccctggcagctgaccacctccaagccctggcttcagttactactccatcctgaccgtacccagggtgacctcagccacgaccctctcctgcacatccagtctgcatggcgtggtcccgagtgttcctggcacgtccccactcccactcccccagggacctgggcgctctggagctgaagatggtagatctttgcaatctttgcaaaaagcgtgggttgttttctcctgtcaaggagtcagtcaactgaccttgggtgggtgcagagtagacccactcctaagacagggcttccggggggcccactggaggctggggtgttcagtgaggcctttctgcccagtgggttgggactcccagcctgtgccacctctggaactccttgggtgcaaagctccagcagctgctgttttcagaactgtcatggagctcctgctccagcaaagcttctctgggcctcaggcctttggcaggagccccctgtacctgcagtgtgggtgtctcgggctccctgagtgccattctctgctcgttcagctccttgggggtccctcagccacgtgctgcagtccagcaggtgcctgcaggcaggtgaggtgacctggggctccctgcatctgttccctccttgagtcgcgccctgtgctgcccatgctcagctgcctcgtgcactgctcagtttttagttacttccagttggtggctcccaagcctgcaagctttgggcctgctcttgttgaaacaagccagggccaggccatcgccccaagaccagcttttcctcttagatcagagcacttcctttaatgacaatagtaccagcttgtgcctactgagtgctggcacccccagggctcagactaatgtgctggccactccacagcctgacgggcatagaggaatggcgtccccatttcccagatgggaagacgcaggctggtgggcccctgctattggccaggtgatggctggggttgggcccctgaggcttgttgggacccgcctgcactaggcctcttgccagatgtgccacactggaaacagcccagagtccactcagaggggacttaggggcatgcctgttggatgggccagcccagtgcctgtttctggggtcccagtggctccggaggccccagcacacccatgggagataggaccagcccatagctggggccgggtgaggggctggtagggtgggcgctgctgtccttctgtgtgcaggtttctcctctctccagtggtccacagtggggcccctgagggaaggctggggcttggaggggcagctgagtcctaggaggtgctgaggaaagcgggaagggcacggggctccctgaaaggcggctgcacagggcacagggagggaccctgagggcgcaccatgtaggcagaacttagcatctttgttcagcagatggggaaagtgaggcccattctccaaggtcagggctgccaggctctgtcatggctctcacctctgaggggtgcagaagtggctgatgcttgcctgcacccaaaagctggaggcctgggctggccctccccagagctgcctgcttgtggctcacctggcacaggtgtggcctgcccctccctcttgccccaaggtttggtctctttccaaggggaagcagcggctggttgcctgtggaatgggggcggggcgggggggggtgttggggtgggagttgggctggagctggccggcccccaggcggattggctactgccctgggggcaggggcgtccctgggtaagagggaggcagtgggcagtggtgccttcggacctgcggtctcagcctacatacagacacacaaaggggactttgcatgcgacttccttggccctgcgcctgggccagagccttcctgagtgggagctgccagcaggtcctccttgccctgcctgacaggagacattgcttccctgcctgggaccactttgctgcgggcgctgggtccccacctcctggctgaggctccccgtgtgcttgagtacacagacggcatcaaggcacagcctctgaatcgtcttcgctggcccagacctgctgggtgggaacaagctgggatgaggcctggctcggggagcagcagggcccatctgccagcgtgggccacatgtgcccctgctggagtcctgccctctgagtctggtgggatgaggctcggccagggtgggggccagcgggccctcgagggacagggcctgtgtgcaggggcaaagggaccagcgaggtttgctggccactcccaccttctcacccctcggccactgcagtgggagcggaggagggcggggtgcagccccaccgagcggggcctcatacctccctgtcttccttgcagccaagtacccggccatcaaggccctgatgcggccagacccgcgcctcaagtgggcggtgctggtgctggtgctggtgcagatgctggcctgctggctggtgcgcgggctggcctggcgctggctgctgttctgggcctacgcctttggtggctgcgtgaaccactcgctgacgctggccatccacgacatctcgcacaacgcggccttcggcacgggccgtgcggcacgcaaccgctggctggccgtgttcgccaacctgcccgtgggtgtgccctacgccgcctccttcaagaagtaccacgtggaccaccaccgctacctgggcggcgacgggctggacgtggacgtgcccacgcgtctggagggctggttcttctgcacacccgcccgcaagctgctctggctggtgctgcagcccttcttctactcactacggccgctctgcgtccaccccaaggccgtgacccgcatggaggtgctcaacacgctggtgcagctggcggccgacctggccatctttgccctttgggggctcaagcccgtggtctacctgctggccagctccttcctgggcctgggcctgcaccccatctcgggccacttcgtggccgagcactacatgttcctcaagggccacgagacctactcctactatgggcctctcaactggatcaccttcaatgtgggctaccacgtggagcaccacgacttccccagcatcccgggctacaacctgccgctggtatgtggctgggctggcagggctgcggcggggcagggctgcacagccatcggaggaggtgggggccctggaagggccttgggccatgcccagcagcctctccctttttgtgctagtcatggcatggccacttgcacttgtccccagggcaggaggaaaggccacacaacacaggcgagtcctctgctggaggctgaagcaaattcagggaggtggggtctgagaggcatttcacagtccaggctgcttgatgccgccatgatactgacagggtgtcttccttgaagaggggcagcattagcaacactgcacgggaagcaccatccttcccgtctgcaggctctttccctgctcattccttgtcattgccctgtgaccctccaggggccagagaggacagggtgggccttgcccttcgcagcccaaggggcttgggcagagctgatggggagtggaagccccgggtatgggcatctttgccttaggagactgggagctggagaatttctgaatgagaaaggaggaaggggaagggggaggaggagccgtccctcagccattgccagcctgtgccttggtagcctctggctgcctggaaagagctggagttacctgtggcaaagggggcgggaggaggtggcactggggaggtgttcgagcgcctgagcgcacgcctctgtgtgcaccggggtgtgcacgtgtctgtgtgtgagcatgtttgccctgtgattatgtgtgggtgcctgcccacgtgcgcaggcatttgcatgtgtgcctgggcgtgcgcacacgcatctgtgtgtggttatgtatttacctggttgtgcaggtgtttgtgcacacgtccctgtatgcgtgtgcactgtggcccgtgtgactctggaatcagaccaaattccaagcctgggccgtggcctgtgccctccattccggctggcagtaccaaggcggtgctctgcaccagggaccatctcacttgaacttcaccacagcccaggaggcagctgcctcctcatccattatccctgttgtatagataaggcagaggcacgggggagaggtgcccgcctcaggaggtgacggggcggaggggagaggtgcccgcctcaggagatggcagagcaagttggcaagagtgcctgccgtgagccatgagcctttacctttcctgagcaaagtgagaggctctgggtgcctggtgctggccccgctgtcctggttttgcggccaggctccctgcgtcctgagagcatccttaggaggtgacagggcaaagagggggcaggaaaggcatcctggggggggggggcagggagggcatccctgtgatgggagctgggccaaggctgcatgccgttgagcagtggggcggcgtggtggtggcgcagttgcgggcgctgaagctgggagcacttcctggaggaagttggtgggggtgtctgtgtagagcaaaggctggaggggacagcaggtgctcaagaggcccttggaacatgacaagcagtgaggctggctgaggccaaggttggcggatcacagggctgagatgcatgggtgtgacactgtggcctggtaggactcaggcgggcactcagcactgcgcaggcgctgcgggagaactcccccgagcagtggggtctgccgggtcagaaggcggggccgagtggagtggtgcaatgaattctgcaactaccacttggggcaggcgctctgagctgagcccgtgggtgcctctgccacagcgtcctgggcgcagttcaggccaccaggccctccagcagccagcgccacgcttccaggcacccaggaagtggtggttggcagggaggaccagaggggtggccttgtgtttggccaagctggacatgggcaccccagaggcgacggtgtgtttgcattatgtacacccatgtgtgtgtgtgggtgtgcgcgcgcgcaaacatgttcgtacatgaatatgcatgtgcatgcccaccgcgtgtgctcaggtgtctgcgtgtgtgctcgcgggtgcggccccgaggagaaccagcccctgagccccgccctcctctctacaggtgcggaagatcgcgcccgagtactacgaccacctgccgcagcaccactcctgggtgaaggtgctctgggattttgtgtttgaggactccctggggccctatgccagggtgaagcgggtgtacaggctggcaaaagatggtctgtgagcccgggctgcctcctggtggtggccattgtcccccatcggcccctcagccttgcaccccagcactgagaagctacatttccttcctgtgctctggactgctgcccttgtccccgaggagtgtcccgcgcagccacacctggcaacagcagtgtgggctgcagggctccgtctgcacgtggacttgccctggaccttgagtgtggccctccctttctgggcctccccaggtgaggcctggccctgccccaccatgacctgggtgctctgagcccacggttcccacggagctgacttctccggggtgcctgtgccctacattaaacccggcgtttgtttcacagcccatggattgtgcttctgagggggtggtctgggcttgagcctggccccagggaatggggcgctgggccgc

What is claimed is:

1. An isolated nucleic acid molecule comprising a polynucleotide having a nucleotide sequence at least 95% identical to a sequence selected from the group consisting of:
(a) a polynucleotide fragment of SEQ ID NO:X or a polynucleotide fragment of the cDNA sequence contained in Clone ID NO:Z, which is hybridizable to SEQ ID NO:X;
(b) a polynucleotide encoding a polypeptide fragment of SEQ ID NO:Y or a polypeptide fragment encoded by the cDNA sequence contained in cDNA Clone ID NO:Z, which is hybridizable to SEQ ID NO:X;
(c) a polynucleotide encoding a polypeptide fragment of a polypeptide encoded by SEQ ID NO:X or a polypeptide fragment encoded by the cDNA sequence contained in cDNA Clone ID NO:Z, which is hybridizable to SEQ ID NO:X;
(d) a polynucleotide encoding a polypeptide domain of SEQ ID NO:Y or a polypeptide domain encoded by the cDNA sequence contained in cDNA Clone ID NO:Z, which is hybridizable to SEQ ID NO:X;
(e) a polynucleotide encoding a polypeptide epitope of SEQ ID NO:Y or a polypeptide epitope encoded by the cDNA sequence contained in cDNA Clone ID NO:Z, which is hybridizable to SEQ ID NO:X;
(f) a polynucleotide encoding a polypeptide of SEQ ID NO:Y or the cDNA sequence contained in cDNA Clone ID NO:Z, which is hybridizable to SEQ ID NO:X, having biological activity;
(g) a polynucleotide which is a variant of SEQ ID NO:X;
(h) a polynucleotide which is an allelic variant of SEQ ID NO:X;
(i) a polynucleotide which encodes a species homologue of the SEQ ID NO:Y;
(j) a polynucleotide capable of hybridizing under stringent conditions to any one of the polynucleotides specified in (a)-(i), wherein said polynucleotide does not hybridize under stringent conditions to a nucleic acid molecule having a nucleotide sequence of only A residues or of only T residues.

2. The isolated nucleic acid molecule of claim 1, wherein the polynucleotide fragment comprises a nucleotide sequence encoding a protein.

3. The isolated nucleic acid molecule of claim 1, wherein the polynucleotide fragment comprises a nucleotide sequence encoding the sequence identified as SEQ ID NO:Y or the polypeptide encoded by the cDNA sequence contained in cDNA Clone ID NO:Z, which is hybridizable to SEQ ID NO:X.

4. The isolated nucleic acid molecule of claim 1, wherein the polynucleotide fragment comprises the entire nucleotide sequence of SEQ ID NO:X or the cDNA sequence contained in cDNA Clone ID NO:Z, which is hybridizable to SEQ ID NO:X.

5. The isolated nucleic acid molecule of claim 2, wherein the nucleotide sequence comprises sequential nucleotide deletions from either the C-terminus or the N-terminus.

6. The isolated nucleic acid molecule of claim 3, wherein the nucleotide sequence comprises sequential nucleotide deletions from either the C-terminus or the N-terminus.

7. A recombinant vector comprising the isolated nucleic acid molecule of claim 1.

8. A method of making a recombinant host cell comprising the isolated nucleic acid molecule of claim 1.

9. A recombinant host cell produced by the method of claim 8.

10. The recombinant host cell of claim 9 comprising vector sequences.

11. An isolated polypeptide comprising an amino acid sequence at least 90% identical to a sequence selected from the group consisting of:
(a) a polypeptide fragment of SEQ ID NO:Y or the encoded sequence contained in cDNA Clone ID NO:Z;
(b) a polypeptide fragment of SEQ ID NO:Y or the encoded sequence contained in cDNA Clone ID NO:Z, having biological activity;
(c) a polypeptide domain of SEQ ID NO:Y or the encoded sequence contained in cDNA Clone ID NO:Z;
(d) a polypeptide epitope of SEQ ID NO:Y or the encoded sequence contained in cDNA Clone ID NO:Z;
(e) a full length protein of SEQ ID NO:Y or the encoded sequence contained in cDNA Clone ID NO:Z;
(f) a variant of SEQ ID NO:Y;
(g) an allelic variant of SEQ ID NO:Y; or
(h) a species homologue of the SEQ ID NO:Y.

12. The isolated polypeptide of claim 11, wherein the full length protein comprises sequential amino acid deletions from either the C-terminus or the N-terminus.

13. An isolated antibody that binds specifically to the isolated polypeptide of claim 11.

14. A recombinant host cell that expresses the isolated polypeptide of claim 11.

15. A method of making an isolated polypeptide comprising:
(a) culturing the recombinant host cell of claim 14 under conditions such that said polypeptide is expressed; and
(b) recovering said polypeptide.

16. The polypeptide produced by claim 15.

17. A method for preventing, treating, or ameliorating a medical condition, comprising administering to a mammalian subject a therapeutically effective amount of the polynucleotide of claim 1.

18. A method of diagnosing a pathological condition or a susceptibility to a pathological condition in a subject comprising:
(a) determining the presence or absence of a mutation in the polynucleotide of claim 1; and
(b) diagnosing a pathological condition or a susceptibility to a pathological condition based on the presence or absence of said mutation.

19. A method of diagnosing a pathological condition or a susceptibility to a pathological condition in a subject comprising:
(a) determining the presence or amount of expression of the polypeptide of claim 11 in a biological sample; and
(b) diagnosing a pathological condition or a susceptibility to a pathological condition based on the presence or amount of expression of the polypeptide.

20. A method for identifying a binding partner to the polypeptide of claim 11 comprising:
(a) contacting the polypeptide of claim 11 with a binding partner; and
(b) determining whether the binding partner effects an activity of the polypeptide.

21. The gene corresponding to the cDNA sequence of SEQ ID NO:Y.

22. A method of identifying an activity in a biological assay, wherein the method comprises:
(a) expressing SEQ ID NO:X in a cell;
(b) isolating the supernatant;
(c) detecting an activity in a biological assay; and
(d) identifying the protein in the supernatant having the activity.

23. The product produced by the method of claim 20.

24. A method for preventing, treating, or ameliorating a medical condition, comprising administering to a mammalian subject a therapeutically effective amount of the polypeptide of claim 11.
